United States Patent Application Publication US 2026/0324648 A1 - sequence listing, part 5

SEQ ID NO: 17 - DNA, 4277476 bp, synthetic construct (residues 1-2,138,738 of 4,277,476)
  source 1..4277476: mol_type = other DNA
ttcgattctactaaggctccatgctcttccgcttctacaaactcgccattctcattcagcgaataccaaacatccggctcaattccgttctcgcctactttactggcacggatatgaattagttcgccttcgccatttcggtagcacaggacgattgcgccgctttctgacgctttagcctttccaccatcaccgaatgaagccgctacagattgcgatccagacacctctgccgctgaccagtcgccagtgttggttgccgctgaccggttgccagtgttggttgccgctgactggtagccagtgttggttgccgctgaccggtagccagtgttggttgccgctgaccagttgccagtgttggttgccgctgactggtagccagtgttggttgccgctgaccagttgccagtgttggttgccgctgaccggtagccagtgttggttgccgctgaccggtcgccagtgttggttgccgctgactggtagccagtgttggttgccgctgaccggtagccagtgttggttgccgctgaccagtagccagtgttgattgccgctgactggttgccagtgttggttgccgctgaccggtcgccagtgttggttgccgctgactggtagccagtgttggttgccgctgaccagtcgccagtgttggttgccgctgactggtagccagtgttggttgccgctgaccagttgccagtgttggttgccgctgactggtttccggtcatgatctgctgttcaagcgacttatcaactttgctccagatccaatcaatcccgcgctgaataaactgagggagggttagttcttctgtgatggttatgctggcgcttgcgatttttgtatcgccatcatcttcgcggtcaataacaccaaatgattcagttactgcataccggctatttgttggcgggtaatatccgaaaacatcaaatgggcattcacaagcgtggaagccagagccgcatgcctcgaccttgccctcatgcgtatacgttttgccaatttcgaactggtagccacggcactgaagattttggtcgaagcctttaaaggtaataactgtttctttgctcatgctgcttccttgaatttttggaataaaaaagccgcattaagcagctcgttgtttgtttcagtggtcttattgctgccaccggttaagtggcaggggtaagatcactggggttccgagatgaaatctaatacttcctgtaaatcaccgtcacacagagctacatatccatccgcatgcattcgctgaagccattcaatgcttatgtttcgatattgactcatcattcattcctcatttaccagccaataaaaaaggccgcgttatgcagccttgaatcctgtaacctcaatccgacatatcggataggtataaagcttgttgtcctgaacaatcttctgcgcagcttccatgctgtcagcgctgtcacagaacttaatgttctcgtaatacgcgccgtcgtcgttatccggcttgccagccagaacagtgaaagaaagtgtcattctcttaccccttaaccatttacccgccaataaaaaaggccacctaagtgacctctataatttgagctgggatatttatccacgcccagccgtggtttccctgctttccacagtcaaaggaaattgatatgttggttattccacagtcaatatagggatttagaaatggcagattttactgttagggttgagttgcataatgctgacgctgatgactacgaaactcttcacgaaaaaatgaaygcaaaggggtatcaaaaagaaataaccacagatggtaaaacttataaattaccgaatgctgaatatgtctgtagtaaagatttatctacacctgaaattcgtgatgatgtactgagaattgcaaactcggtaaagccaaagtctgacgtattggttacaaaatctagcggaagagcatggagccttagtagaryctamtaatcttgaccgagcttctccttttcctcattattttctgtggaataaagctcaataaatgcctctcttacctctcgggccagtgttttaactggctctatttgctcatccatccccatacctaaagtagaaagtctgtttgaaagcgtttgggctgcgattaactgcatttcaagtggtaactcgacaaatctcataactacctctctgtttaaataagttgaatgctgctacttaacaatgtgtgttgcttctttacggttggtgcggtacccagcgctaaatatcgctacctgaggtaaacacgtcttaccacctaacttctttgctgctggctccgtgaagcacttgcgacgtgcgtcgcgtatcttcgccagctcacaatctttcgcgcccttgtggtgctgctgaatgtgcataagcggtatctttgggttgaagtccaatccgcacaccggacaacgaatttcattcttcatttgccacctctcgtttagagaacttatgactgccgcctacacctgacagcgacagggtataaattcactttctccttaaagaacacttagcggtcgatccctctcggggccgggggtgattacatcgctcaccccgttgcgtgctgcttagttggcgtcctgccgtgttgatggaatagataatagctttggatataatacatgtaaatagccaaagatataataatatagatttagctatttaattattgattgataaaggtatttatttttaaaaataattcaggcgtgaccattcgcaccggctatcaggcgtgaaaagtgtgaagtgagttgtgtttaatacgggtagagtggtgagattgtcagattacaggcacaaaaaacccggcagcggggccgggttattttaatattatcgagaaaagtgttggccctttattgtcagagctcatctgtcaaatttagctccaatgtgccgtttttcttgggcatcacttggtctaccgttttgacaaatcgattccatccatgtccattagatatagccaacctttgtagcataattaacgagtgaaggtgctgagatagcattggattcccaatatctgaagttaaccattggtgtaatttattttttctattacctttatcgtctttgggggattttttttcaagctctgaaagaataccatctcccaatcggtcataaaccaaatctctggtgtagtgtgaaacaacgctatacctgtttttactcatcccttgccatggccaattttttagcttgtaaatattttcgtagaactcatcagggaattttttagcccaagcagcaagttctttacttattattttattaagaaattcttgaagtgcatcccttggtcttacctcttgatacccagtggcctcatcaaccagagatacaataccaacccttgcaaacgccctgataagcatgtctgaatactgagcatatctaaattcctgctctgtggttaacaggttcccatctctggcagcaaggatggcctcgcataactcctgaagaatggtagcttcaaagccatccgcaaaaacattggtgttacttgaaccctttataggaaaggccccaatgaactttattgggttttcgatggccaatattaactctttgtttttgcttgggttaagcattttatgacccgctaaacgggcaaccccttggccacggcctttcatacctattgacgccgttaagcttcttcctgatataacccttcgaccatcatcaagaacaaagcatggaatctttatccctgaaatatcaatctcgcctttatgggtagctttaggcacatttttagccaccgcacccattctagctatttcctttcttctttctgacgaaagggagtcagctctcgctacccctccctttgattgcttgctttccatacactcagcctctcaactttgatgatgagaacaatctttatacaaaaggataattctagcaagcagtttatgtaattgtgcttgctataaacattccggtcgggttggttctattggcggcctaatgctatctatgaactgggatgcctcttttttgactgcgtgaaattccagatcgttaaatgccattattcctccttgagctagcagtaggttagccgtgggttagtaatctatctctgaccaccagaacacgcggccaataatttcaatatcttttagattcttctcttcatctggatattcagacttgttgtaactccgcacgctgacacgaccagggcccacacgataaagcatttttactcgcttccatccatcctcattgatcgcgtacatcttaccgtcaattatctttttatcatcagtgttaatggcgactgtcgcaccatctgatatttttggctccatgctattaccgcgagctgggaagcaaagtattccagatccatcagtgttagcccctattcgacgtagcgttgccttggagaatctgagcataaacccgttgtagtcctcatcagagacgcttccatcgccacatgcaaattcaatatccctaaggaatgggacttcaacctcatcatcgtcaagaggggtatttttatcccacgccttaactccaacccattcactttcaggtgggattgttgagtcaggatggtgtgggtttacaccgctttcgcgcattggctctattccttcactaagccattccggccgaacacctaaaactctggctatttgaacggatttccttgaagagttggcttttcctgaagttagtttccagacgctaggctgtgccatgcctacggcctcagcgagagaaccctgagtaaacccaccttctttcatggctaaatttagccgatctgcaaaagtcattttttccatttacttagtctatagccatggctatacccaatcaaatatctaaagctatttacaatatgaatagctttggctattatctgtgtatctacaaaagcaggagttatttatggtcaacgaagctattaagtcggctattaacatcgtaggaagtcagcagaagttagctgaagcttgtgatgttagacagccttccgtttggtcttggttgcatgggaagaaaaaggtttccgccgaaaatgcgaaacgcattgaaaaggcgaccaaaggactaatccctgcataccgaatcagacctgatttaactgacttgttccctcatccggaaaaagcagcttaacaaccaacagcattaaccgaacgcccggtatatggcggccccgaggatctgccaggtaaggctaaaagtcggaggtgagcgtaactaggctcgccataactaaatcacttaaacaacatggaaatcatacgaaatggatagcgcaagtaacagcaagagaattatggaagttgaatctgagctacgtagccgaatggctatcaaggggcagagcaactttgcacgtgaagctggctgggctgaatcaaaggtcagtcggttaaacgtaagagatatggctgtgacgtttgttcttctggaaaagatatgggagacgagcgtgataagggaaatcgcaaggcaggctgtgattgcggtgaccggaaagcaaaaagccccaacacgaacaaagacttcagaacagcaaatttcaatcagtttctgaggtgataagcggagaaatatatggcccgttcaagaaatattaagccgggatttttcactaacgacgaattagcagaatgcagcccatacgctcgtctgctattcgccggattgtggactatcgcagataaagaagggcggttagatgatcgccccaagaagattaaagcgcttgtattaccgttcgacaatgttgattgcgatgaactactacagcaattgcatcagcacaacttcatcactcgctatttagtggatggaggcgcttacgttcagattaataactggaagaagcaccagaacccccactgcaaagaaagtgctagtgagatacctgaacaagtaatgcaacttattgaaactaaagaagcaccagaagagcacggtgcaagtacggtacaagaaccagagcagaacaatttaaatcctgctgattcccttaacctgattcctgattcccctatcctgattcccttcaacacccaagccgctgacgcgccttgccaaattgatgatgaattaccacctgcaaagcaagaggagttatcgccagagcctcaggaagccgatgttcaccagatggcaagccgctatgcattcgagggttctgttgttcgattgagccagaaagatttcgattgctggaagtctctgttcccgaacattgacctgattgttgagctgacaaggctagatctggagttttcccatgagaagccaaagagctggtttaccactgctagcgccaagcttaactaccagaacaagcaatcaaagccagtggcaacaaaaacgagggctgttgctgataacttttccgcaaaaaattacggaaccaccgacacacccgggtggatggaggggtaaatggacctgtctgaaaaaattagtattctgaaaagcaaaatctcagagctgagtaacccgccgaaagaaataccccatacgacagtcgctatcatgtgggcggagtgcgaccatcatgggctctatgagcagcgacaacgcagtatggccaaccttacaacatctaccaaaagcgaatgcccaaagtgcctagccgagcgacttagcgaacttcaaacaaagcaatcagatcatgaacagtggtccagatcgcgccacgttagtcagttgattgatgggcttaatctgcccgagagatttaaatcggcaactttagaaaactatgaaccggtcaatgatgctgcaggtcattgcttacgagtgtgtcaggcttatgcaaacaagtggccagagcgtttaaagcagggcggcggcatggttatgtgtggcaagcccggcactggaaagaatcacctcgcactggccattgctcaatatgtgattagaactcatgaatcatcagcactatttacaaccgcactacgcatcgctcgggcatttaaatcaacatggagtaaaaatgcagaccgcactgagtctgacgttatcaaagcctacacagatcccgacttgctcatcattgacgaagttggcgttcagtttgggtctgatactgaaaagcaaatcctctttgagatcatcaacactcgctacgagaaaatgcgcccgacaattttaatcagcaaccagacgagagccgagcttagcgatttcatcggtgagcgagtgattgatcggatgaatgatggcggcggttgtacgctggcgtttacgtgggatagctaccggtcgagggctgcatgaatgccttgggccaatacatcaaacatcagatagagcagcaagaacgccacgaatcagacctccgtattaaattcctaagcaagttacctgaaaacaccttccaagccatttataaccagtttattcatgatgagtttgcaggtggcgttacatacaacggaatttactacagcgagtgggaaatctatttcgcatcacatgatcgtgacagtgacgcggaagtgctgctgtaaatcaattcgaggaaatcatgatggcttttgtatccatggctgaaatatcacgcccactctccgaaccaaagttaactgtccgtaacaccggtctttgctcaataaatcgctcggtatctggtgagtttgattctatcgaggctgaaatatgcttcgagacaaaaactttccggttcagagttggtgatgggctatcaaaaaggctgagagacggaacaagtttctcgataccaaaggctgcatatctggaaattttagatggtatcggcgggaaaaaggttatgccattaacaaatggccaagacggttggtggtatgccaaatacgagcaaaaaggggtcgcatgatggacataacaacatcgcgggaagagtttgagaagtggctggaagacattcacggtttgtatggggaagatattgattgggagccagagagaaattgttatcgaatttttggcgttcatctggcttggtgcgcatggaaagaatccagagcaagcattgcggtgacacttccaaaaacttgcagagatattgcgggggaagatgcgcacctagacagcgatgagacatcgtttgattccggcataattttatgcgccgaagccctccgctctgctggtctaacggtaaaaggggattgagatggaaattccaagccgagtaaagagcgctctggatgctatggaggcaatgattcgtacgcacgaatatcattttgaagatggcacattctggtcaccagtggttaagcaacaaatagagggtctgcgtattgccaataaaaccaaagccattatctatcacgatagaatactaagcgggaggaagtgctgatgaaagaactagaccaatttacagtagagcagctaagcaatttcattgaatcagaccatgctcaatgtggcgatgtggcagcactggcaagaatcgcgctatcagcaaagcaggccgagccggtttatcaggagcgtaggtatcaattttccggcaagaaacagattgaatattgggctgacattaacaattcaacgtatgggtacctgccaaaaagtgagcgtcgtttaatttataccactccaccatcaggccctctggaaattcctgatggttggattaactgcaatgataatcttccattagaagatgatttgtgcttggcaattgacgaccaaggtgtgatttggacaatgatttttgaggatgatgactttggtccagacacaggcggagtctgccctaacgaaattacccactggatgccactccccgccgcacccacctcacttctagagggagagagtaatggctaaatctgaaataaccctatccaagaagcaataccgccaactctgcgatgcttacatcaacacagtaaacatgatgcctcagcttctgatgattacaccccttcaagatgacaggtcaccagatgccttgtatgcactacaaacggcattgcagattgttcagcagcaactgaaaggagtcgttgatggaattcatggctgacaatatggggaatataccgctaacgataatagcattagtcattgttgtggtgctgtttgcttgcttatgggagtgactatggataaaaaagtttttgttttatgcggtgatcaatacaagcgaaatgccatccagtttataaatcaactccctgttaatcctgataaaccactcctgatcacaatccaagagcgaacccgcacattagaccagaatgccaagctctgggctactttaggcgatatcgctacacaggttgtatggcacggtcagaagcttagcagtgaggactggaagcacatattcaccgcatcactgaaagggcagaggtcagcaccggggctcgaaggtggctttgtaattctgggccagtcaaccagccgcatgaccgttggagagttgcgcgacctgatagagctaattaacgctttcggggctacgcatggcgttaagttcagcgatgaatcacggcttgctatcgagtgggctaacaggttcggcgataagggaaaggtggcagcatgaataactgggacattggaatcagggctttcatagataagccatactccgcagtcaggcaaggctacaaaccgtcggttctcgattgttgggctatatctgccagtgtcatattcgtagtattcaaaggactattttcacacgcacttgatattaccgatttttttgacatgacaatcagagagattggcgagtggttcatgtatttgtgcttaaaactgatcgtggcatcaacatacccattcacattttgggcatggggtacgcttatatatttcttgctgaggaatgaagcgaaaacgcaccgcaccagaagtgaaaagttatctaacctgatttaacccccaatccccgccagcgaaatacccacatatgaccacatatgcgttttgctgcgcgccaaatttgaccgagtaaggagaacgcgatgactcagttaccgcaatccgtatgcgtgtattgatttgatgcttaacaagggtgaaacctacgctcatcagaaatgcgttgataaggcagcgaaggaggccgggaatgatagccaagctcccgaagcatcgaaattgtaaagtgtgtaaaacgagatttaaaccagtcgcgatatacgagtggtggtgctgcgaagagcacaaaatagaatacgcggttctggttatgaaagagaggcgaaagcagaactacgataacgagattaagcaaaggcaggagcggaaaaaggaggatcggaagcagctaaaagtcagaagaattaatgcccagcccaaaacgtattggattaagcaggcacagcaagccgtcaacgccyttgtaagagcacgtgattcaagcctgccctgcgtatcatgtggtacccatttagcggcacagtgggatgctggacactacagaacaaccgcagcagcacctcaattcagattcgacccccggcaaatccataaacaatgttcagtatgcaatcagcacaagggcgggaatatcgttccgtaccgcgtcgagctgattaagcgcattggaattgagacagtggaggctatcgaaaacaaccacgaacgcagcagttacagcattgaagagctgaaaagcattcgagattactaccggctggaactgaaaaagctaaaacttctccaggaggcagcatgaacgtaactcaattaaagctcaccaaagaacagcatgattggattaatggctggcttgaactgtggggttcatgggtttactcggggagattagagaagcgcatgagcagcgttatagcgcagtacatggctacaatagagccgcagaaatatccagatagaccgatgtgtaatgacgatgacggaatgttgatttctcaggtcgtagattctgtcatgaacattgatacaaaggcctttgggatattactaagctattacgcgaacaattccactgaatacgcaattgcagtttatagccacaagagtgcaattcctcgcaaaatagtaactcgcggcgggaatagattaaaacgcccatcgctatcaacctgtcgccgagaggtgaaggaaattctggatgctagcgtctttatgatttaccaaccgcygctatctgccatgaacagccgcaaacgtgtagggaaaattaggaaggttgcataaaacgtgttgacacatttgagcaaatgagcaatgataagtaggtaaggtgccgtatctgtcttaaacgaacgcctacccaatttaaagccctgactctaaccggtcggggcttcttgcatttgcgtctatggttaagtggcataactactggcttccacccagtaagcgccagttcgattctggctagacgctccacatttcaggctgcgctattgcgtggccttttttatttagctcgccgccagtgccaatcaccctcaaaaacacaacgtgcctgaatgggccacggcggcgagctattccctacacaacagcacccgaccaaatgccggggaagattttccccaaacggggggtgggtcatgaaaatgttgaaatcaccggatgtatggatgctcatcattgcctggatagcagaccaccggggtgagttacttagcgcggcactggctgcgttgatggcttacttgcgtggctggtatgccggaggaggtaaaacgcaacgtatgcttgatgcggccatgtgctcagtgatggcatggtttatcaaagatgtattggttatagccgggctgaaccctgactggtcattaattgccagcgtgttcattgggtacatgggtacggattacattggttcggtgctaaagcgcatcgttggcaataagacaggggctgacaatgcaaatcagtagcaccggaatcaatctaataaaacaattcgaaggctgcaaattgacgacatatccagaccctggcaccggcggcgctccctggacaattggttacggctggactcatccagtagatggtaagcccgtggttcgcggcatgactatcgatcagcctaccgccgaccggttgctgaaatgcggagttgtccagttcgagcagggcgttaaccagatgctcaaaatcggcgtaacccagaatcaattcgacgccttggtatcgctggcctacaacatcggaacccgagcgctcagcacatcgacgctgatgaaaaaggtaaacgcgggtgatgcaaagggcgctgcggatgaattcctgaaatggaataaagcaggtgggaaagaaatgaaaggcctgactaatcgccgggcggctgagcgtgagcttttcctgtcatgagtcgcgtaacggcaatactcatcgctgtaacggtggctctgctattcggcctgatgtattaccacgggcaagtaaccaggctacagcgcgacgtctctgacattacccagatagccaacagcagacagtcagccattgacacgatgctaattcagcgccagcaggttgctgctatcgatatcaaatacaccaaggaactggcagatgccaaatctgagaacgagcgccttcgtgctgatatcgctactggtgctaagcggttgcagctcaacgccagctgtaagcgattgcccgaagccacagccacctccagcagcgttgatgatgccagcgccagacttactaacgccgctgaacgggattatctcagtctccgcgagcgaatcggaattgcaaccagccaaataaacggcttgcaggcgtatatcaataacgtttgtcttgcgaggtaagagaaggtggggacagcatccccgctgaattaatcacccaactttgcggtaagggtagccagcttttttgatatgcgcatcaaaatactgccccttagacggtgcgttcattaatgacgtgtgaatggaggccgggactctcgaatattgataaataccgcctcctagaaaagcaatttccaaagtggaacttgcactatcgtaaccaactgaatgaaggtttgaagatgaaacaggttgacgaatcaattgataaatctcctttaagtggcaaaagtgccaaagagatgatcgaacactttaagaaatataacttcgtggatgatcacggacacaggctagacatgtgcttggacttcacagatttgattgaaatggccgtttcgtaggcttgttaggcaaaaaaacacaaaaggctcgacttaggtcgggctttttttatgcagtaaatccagcgcatcgcagcgcaaatcactcagaacctttcaggatgacccttgaggaaccggctggctgtcggagccttctgagggccgtattcctgtgcgaacaaggttcatcactaaaaggtatatccgaatgaacattatccctcttagctataaaggcgaatcagtacgctttaacactgaaggttgggtaaacgtcactgacgttgctgagaaatttggtaagcgcatcgacaactggatgaggctagctgaaacgcttgaatacatccgggcgctggatgaggcaatgactggtgtggagtctgaaattctacatccctcgaaatgcaggtatgtaaaaaccagtaaggcgagaaaggatcgcggaggtggtacatggcttcatccaaagctatcggtcgcttttgcgcgttggtgcgatgctcggttcgctgtctggtgtgatttgcatatagatagcttgttgcgtggtgagctaacggagcagcaaaactatgaccaggcctgccgaattcgcgatgaccggaaatcaaaagcaagtggtggtgcacgagaaatggcacgttggcgctgggacaaacctgccctagaagcaaccgtggaattctggcaggagcaactgaagttaacgctcgatattgccagctaaaagaaaaactgagagccactttcacaacggctctccattaactaaaagcactcatatatcagataggcgatcccgaccaaagaggccatccctgtaaaggttagccccaatgccagggtggagtagctcactgttgcagccatgtaccaacttttaaatttagcccacatagtcatcatcctttttgttttgcaaaagaatgacagtcaaatcagagggatggaaattggttgtacagatcaataatcggctattgatcgtttaaaacgatcgttgaacaacgagacggagcaaatatggcaagaccggattggggagccattcaaggacagttcctcgccgaccatgccaaatcaaacatctcccctaaagattggtgcgaggcgcaagggcttaattactccactgcaaagcgctacatcaaaattgcgaatgctaatagtaaaagtgcgaatagaagtgcgaattcgcagaaaggaaaagacaccaaaagtaggcagccaaaggaatctggtagaaaccgcgaatcaaacaaagtcaagaattctccaggcgcgaaaccgatacgtggcgctcgatgttcccctccgaccaatccattccaaccaggcaatcagcatgcactaaagcatggcggctatgggcgtcgcatgttgctcactgacgaatcagcgaagatgctaattgcctgacgctagatgatgaattgttttggctacgtgctgccagtctgactgccgctgagaacattggtcgctggcgaactgagttagatgatgacgttgatgatgatactaagaaggcactacgtgacaacatcagcgccgccgagaaggctatgcatcgcaacactgcgcgcattgaatcgttggagtacacgaaaggcacaatcatcaagatgcagatcgatgctgcttaccgtgaagctgccactgaaaaggtggaactggaaatagacaaaatgaaggacggagatagcgataacgcgattgtcgttcataactcgctgccaatccctgggagataatatggccgacatatatctacctacgctacacgatgggcagttaaaggtttggtctgatgcttgggatcaccgccttaacgctatccgctgcgggcggcggtggggtaaaaccttcatgctcgccagcgctgctgttacgtatgctacagcgccatttaagcgccctggaatggatgtcgagttaggtgggcgcgtaggtatatttaccgccgaatatcgccaatatcaggaaatttacgacaagcttgaagaaactcttcagccgctgaaaaaaagctttagccgacaggaaaagcgcctactacttaagaacgctgggaagattgatttctgggttaccaacgataacaagctggctggtcgtgggcgtgagtacgatattgtgcttatcgatgaggctgcattcaccaaatcaccggaaatgctgaaggaaatatggaccaagtctataaagccgacgcttcttactacgaaaggccgtgcatttgtattctccacacctgacggcattgacgacgataattttttctacgccatttgcaacaataagaagcttggcttctttgagcatcacgcaccaacgtcatctaatccatttgttccacctgaagaactggagaaggaacgggagaataatgatccccgcgtattccgtcaggagttcttggctgaatttgttgactggtcatcatctgccctgtttgacataagcaagtggttcattgacgagaagcctgttgagtacccagccatgtgtcaggcggtctttgctgtcatggacacggcagttaagggcggcacagagcatgacggaacagcagtagtttactacgccattgaaactcgccccggcatggagcgactaacaatccttgattgggatgttgtgcaaatcgatggcgctttattagaggtttatctcccctccgtattcgaccgactaaatgaattaaccggccagtgcgtcgctgtaaacggcagccttgggttgttcatagaggacgccagtatgggcagtatcttgctgcaaaaaggcgacagcatgggttggcctgtcaaaaagatagagtcagcactaacaagcaaagggaaagatgagcgcgcaattatggcatccggttatcactaccgggggttagccaagatatcgcgtcatgccttcgagaaaactgctgtctttaaaggcgagacagctaaccatctatttaagcaagtatcccgattccatctcgcagataaaaacgcacataagcgcgctgatgacctgctcgatgactacatgtatgggctgatactggcattcggtagcggcgacgcactctgatgagataacaaaatgattgacgacgaaattgaaatcggcagcagctcaccagaactgtcactacttctggagggtgatgatatccagccaggaatgagcgccggatatcaaatctgtaagactatttacctctaccatccgctgggtgggaaaatggtagatcgcccaattaaaatggcgatgaacgaaccaagaacggtacatgtttcccaaacatttgcgcttgaacaacgcctacgagaagccttcgagcgcgagtggcggtcacttggtgctgaccgacacatttcaaatgctgcacggattgccagaatttacggtacatctgcgatagcgatgttggtagataaccaagagccgtcaatagcccttgatttccgcacgctgtacaagcacaacatcagttttaacattcttgacccgctaaacactgctggcagtattgttctcaaccaagaccctaacgctcaagacttccaaaaagttgatggcattcgagttgcggggaaggcatatcacaagtcccgttgtgtggtgatccagaatgaagcgccaatttacctcgcgtataacccagcagcgttcggtttcacaggtcgaagcgtctatcagcgcgccttgttcccgctaaagtcgtttattcagaccatgcgcaccgatgacatggttgcagtaaaaggcggattgcttgttacgaagattaaagggcctagctctgttgtaaacaacatgatgcagaagcttagtggtgttaagcgaatgatgctgaaacgcggacggaccggggaggtattacaggtcggtcacgaagatgcaatcgaatctattgaccttaacaacctcgacaagccactcgatacagtgagaaatcatattctggctaatatcgccgctgccgccgacatgccagcgatcatcttgaatagtgagacatttactcagggatttggcgagggcacagaggacgctaaagcggtagcagtttacattgatgatctgcgtgaatggcttgatgagttgtacaactatttcatccgcatttgtcagtaccgagcttggagtatcgaattcttccaatccctgcgtgcagacatgccagaaataaagaacacctacagtctgtatttcaccaagtggattaataactttgagtacacatggccctcatcgctgaaggagccagaaagcgagaaagttaaagttgatgaaatcaggtttaaagcaattattagtatgggggaattgctgcttcctcaactaaataaagacaatgaaaacagagcaacatttattgagtggatgcaatcaaacgctaacgcaaatgaacgcctcttccctaaccgacttgaccttgattttgacagcctgaaggataatccaccgattaaagagggggaagacccaaataaccctcaagttgattggaatttagtatgaacaatttcacgcgaattgtgcgagaggcggttaagtatttcctgaagaatggctactcatcaagcagtgagctggagcgctggcagtctcttattagaggggccgctgagggtgctactgctgatgattatgccggtatggtagccgaaagattaaggcattcattcgagcgccaagtaaccaacggtggtgctattaatcgtcatccaggaatagcgcgctttaccattcaccatcttgaaccacagcttagggcgcagttagatcgccgaattctcgccagtgttgacctcatcaaactgaacagaagcaaagctatcgacactacgttatctcggtttagcgggtgggccagcagtatccctccatctgcaagtatcgctctggtcggtaatcagggtggcatgctgaaaactgcacagcacatccaaaaaacagccgagcaaatggactatgaagcccggcgcgtgatgattgatcagaatcacaagctgattgccaacatcgacaatgttattgcaaccaacaacaacgctatcgctgttgagtggcacagccattggcgtcgccctggctataactatcgggttgaccacaaagagcgagataaagagttctatcttattcgcggtaattgggcgcaaaagaatggctatgtaaagcccggtaaagcgggatatctggatgaagttgaccagttcggagaaaagcctttctgctcatgttatggcgagtacatctacaacctccgcagcatccctgaagacatgcttacccagaagggtaaaaagtttatggagtcgatgggcggaaaataactaaccacccatgacgcgagaggttcaatgacccgtggctattttcgctagtggaatcctatttcgccaaggtaagcgagttttacttattcagcgctcagatgatgggacatggtgtccaccgggagggaagcttgaagaaggtgaaatagcatccgacgctgccagacgagaagtgatggaagaagttggctatcagtatacagggccaatgaccccctacagcagcaataacgattacctaacctatcgagctgacattgaagaacagttcgaaccacaaattgacgatgagtcactagccgctggctggttcgatatcgacgatatgccaaagccattgcataaaccatttgccgaaatgatggctcaacagccactcaatgaaacgcaagtggctgcgctaatagctgatggcaccctaagcagtccgcaattcttcatcaacatgtggatgtacgccattcgtgtaaccgggactggggtcacgtggcgtagtgctgacaaccaaatggcgttccgagacccggaaaactatttaacccccgattttcttcagcgtgtagccggtgtcccgttgatttggttgcaccctgagaaaaataagctcgatagcgatgaatttgcaaagcgggttattggaaccttaacgaatagttgggttgctgataatggggaggtgtgggcgatagcccgtgtttatgatgcagaggctgccgaaataatggcaacaaagcaattaagcacctcaccaaccgtcacgtttagtgaaccgcagaatgcagttatcaaagtcgacggtcagtctctattggtggaagactccccggtattgctcgaccatgttgcaatttgtgaacagggcgtatgggacaagctccttgaccctactggtgttaaatctgattccattccaaacgaggctgaaataatggacgaagacaaattcgtagaactattcaataagtgcatggattctcgcatggcgaaagccgactcagaggctaaagaaaaagccgatgctgaagagaatgcaaagaaagaaaaggctgatgctgaagcaaaagaggctgaagaggccaaggctaaagcagatgcagaagaaaaatccgcaaaagaaaaagctgacgagaccgagttgaaaaaacttgagaacgaagcaaaaggtgaagatgaccacctggagaaagagcgcaaagagcgtgagaaagcagactcagatttgcgcagtgaaatggcacttctaaaatctcgccttcctaccgagctatctgactcagaacgaaatgaattagctgatgcgcaagttaaggctgatagcgtgttctctgtgctgggtaagcgcgcacctatgccgctctctggtgagaaaccactgtcatatcgtcgtcgcctgatgatccagttacaggaacattcaagcgattacaaagcagttgatctctcttcaatcgctgactctgcattgttgaatatcgcagagaaacaaatttacgccgatgcacaatcctcagccagtttgagtgttgggcctggcatgttgcgtgaaattaaacgctccgatgttactggtcgtcagattagtaccttcgaaggcgatccggcagccacttggggaccattccaaatgggtaagcgtcaggtcaccatgttcaacaaccaggcttaacgggagcattaaagcatggctaatttatctctaaacccaatggcgacgactaacgcattgggttctttcggtgttcagtctgacggcttcattcaaggcgttgctttggatgacccggctaatcgtttcaatcttgcttccggcaccgtttctgcaactgagactaaacctctgtggggcggcgtgccggttgctgagctgatccctggcgtatcttccagccctcgcggttcgaccattcgtcgtgcgctaggcgtggctgatattgaagggtttacagttttcaatcaggcgcataatgggctgaccactccacaatcacctgttccactatttgcgtcaggcatgagtgtttccttctatcgctttggcgcgaacatgcgtatcccattgaaagcatcttctgcggtgatcgcgctcggtgccaacaatgcatctgtaaaaacagcattggcgtgggacttcgttaacaaccaaatcaccacagctgccgatgcgggttatgcaggtgctgatattgccaccaccgccatttcattcaccggtggtgtggctacggctactactggcgcggcgcatggattaactgctggtaagtacatcaccattagtggtgctgttcctgcggcttataacggcactgtagttgttacctcagcaccgacagctaccacgttcacttatgtgccagcgtcaacacctggtggcgcagcaactacacagggaactattggcgcggtaactctggcgaacattacgctgccggccaaagttatctcaatacagtctggcaactcaaaaaccgtctcttatgacagtgttacgggtttcctgacatggaatgatcacgacagctgcgcgctggtcctaatttaatcgggagttgaattaaatggctgcaattactccgagttacacgatcgtcaatccgtcgtacatcgcgccggaaatgatcattggctaccagcaggcgtcaggtgcatttgaaaccatcgccagcggtaacccacaggttcgcctgggtgttggcgatcagtatgtttacatgcgtcgtcttgatatccgcacccaggttacttccagtcaatccgggaacgctaaccagttgccgagtgttgcaatggaagcccgcatgatttccactccaacatatcttttccgttgccgtggtatctatgaccaccatgacatggcagcagcaggaaactggaatgtggcactgcctgaagcacagcgccttggtatgcgacagggtatcttccagcaacttcgtaccagcttactgtttggtatgaacccagcaggcggtgagggcttgctgaataccgcaggcgcgaccactgacactctgccagctgactcaagcggaaacaccacggtcctgacttacgaccatggggaaatggcggtttatcttctggggcaagttcaggcagcgcttacacgaaccatgcaattgggtcgccagcagcgcgttgtaattcttggtcctcagcgtgtgctgggtgccatggagattcagcagattgttcaattgacatcatatcagcgccctggtggtggtactgatgcagttggcgggatggtgaaggaagttctgagaggtgccggagttcaggttgattgggtttacgacgatacattgatcggcgctggcgctggcggtacagacgttgtgttaattactatccctgaagttgaagttccgatggttaactcaaccattaacaccaacgaatttgccaaactttcaccttctctggctgcaaatgccctgatgttctgtgacatggctgcacctcgcgaaattcctactccgatcgccggtggcgcagtagacgtgttagcagaaatgcgttcaacatctggctgggccgttcgtccggaagctatcactatcttatctatggcctacagcgcttaagtctgcgcgttgtcataagaacccctgctggttaaatccttcaggggttttttattttgggggaaacgatgaagctttatatcgcaaacactactaagcagcgccacatgttctctttccgtaccttagagacgggtcgcttgcgcaacattcctattgcttatggctctcaagccattgttcttgatggtggcgctgaagaaatcgatgcagttatccagcatcaccaagtttacgggctgatagatgcttcaactattgaccaaagtaaaaactttgttggcctttgctacagcattgataagccggtgcaagagaagatcatcgaaaaagcgatgagagataacgaccataagttgactgaaacctctcataaccgccgtcaagcgtcagtcgcagctcaagacgatgcattgctgaatagcggtaccggttatggcggtgacatggagttcactgtcgagcagacaaagggccgtgatgacaataacgacacgcctagcgtgaatgaaacaattgtcacccagaagcgcgggagtaaaaagtaaatgaccatcagtctgtcgggatttatcgagtttattcgcactgacatggagattaccgctactcaggttcccgacgactcgccttcaattgctcttgcttacggtggcgctgttgagtgggtgaatcaggatattgcctctgtgatgccgaatctctatacggtggcggtatataaccttgctgcttcattcctggttaactacgggacggaatcagtattttctgagcttcgtaaaacgcttgggctgaataacttcaaggctggggtgatcaccggagccagcgataactcaacaagttctcagcgcctggtgcctgatttcttcaaggacttgtcattagctgaccttcagatgctacttgacccttgggggcgcaggtacctgatgattgctcagcaattcgggagtttgtgggggctatcatgatcactctccatctcggtgttatggacatcccttatggtgatgagaacacaaccactggcgacgtagcagagctgctagagggtaagtacaaaatcatgcagacgttctttgaccggtacggtaaagatatcgctgacatgatggctaatgatattgctgccagtcttgagaatatgattgtaggtgcgccacctacaagagatccgttagctgaatcaatgtcacgaacgcacaacctatttgtcgcgtttttggataatgaagagatgaatgggttagcgggaattccaactcgcagggcaatggaagggatatcgaagagattcaaaaataagaagggtagcccaagaccatcctttatcgataccggaacatatcaggcgtctatgcgcgcctgggtaagcggggtgctgaatgccttccctagctgagctacagaaaactgcacaaacagaacttaatgcggccttgactcagggcctcgatgacataagcctttccgaggtcgtcacatttacaaaatatatcaggaaggttctccctctggatggctttgtgttctgggtaaaagcgtcaattctcactgacgaaccagatcctgagccagatacggtggatgtgaaaggttacctgcacttaacaactgaaaccatccaagatgatgagcaactttacgaccgaaacgtagtgacattcaccgctcagtcggatatcgaccaatttaatgacatcggttctgatgtgctctacatcggtgagttttacggaatacagttctcgttctctcggcgaaccggcctgaatgaaccagctaatctatatcactacactggcgaagctgtatatccgcatatgcgatcgcagattatcaactctgctgaagatatagatttaactgatgtggttgtctctagctccctgccgatctggttggggttgaatcagtacatgccaatgtatccagccatgttatcaatccagaatctttcgccaccatttgcgacagtcaggtgtagtaacgccgctcctattgccggggcgttctatctggatgagaagtacaaccaataccagcttgtttcggaagatgtgaccatttcagtaaccggattgcgtaatgccgcaatagaggactttctttgctacatgcagcaatacacgataagtgatgacgctgaaatgggaattatgaacattcctgtcgttcaagatgagcgcgtgacgcagaacgaacttaacgttactgccatgcgtaaaaccatcaaattcaagatcaactattaccagcaacggatgaggaatgtcgcccgtaagttggttatttctgtaatcccgtccatttatccggagaaataattaaatggcaattgttaatattaacgtatcggtgaccaatccaccgaagccgtcgcaactgcttaagtccggggcgatgatttccatgggcgggaccacgctgaatccaggcgagtaccagttactgacatctaaatcagatttgacaaccatcctaaaaccagcaaaagcgattgctaccattgaatgggctacaaacgtagtgacagtaacgctttcggccgctcatggatggacaattggcgatcaggttcctgtattagtttcaggcgttacccctactggatataacggtgcatttactgccacggtaaccacatcaactgcgttcacctatccattatcagttagccctggcgtatccacggttatgggatcggtaaaaactgtagtagcgaatgaaattacccagatgaatacttcatattgggcgcagggaactaaccgagcagtatttgtgctcgagcttggtgatgtatccatggtgaatggtgttgcggctctatcgacatttattgatgaagatatttcactggggaatacataccagaaattcttctcttatctggttccgcgcgagtgggatgagcagacaacatttaaaaccctaactgggcaatatacatcgccaagttcgttggtttatttctttgttactaccactattggcacttattccgagtgggttactacgaagaataagacagtatttgcaggtgttgaggccccaaatattccggcaacggagttttctatggctggcccattccaatcttcactatcgaatgaccccggttcatcaaacatggtcccgccgatggcatatcggttcatgtatggggtaacagaatatccagtgagtggtaatggcacactgctgaaaacccttcaagataacagcattaactacatcggcactgcggcagaaggtgggcttagcaataagatgctggttgctggccatatgctggacagtaatccattcaactattggtattcagttgcatggacggcgataaaccttgaactggatcttgctaacgaagtcattaacggctctaacacctcaaccaaccctctttactatgagcaagttggtatcgaccgtctccaaaatcgcgcgttgaaaacactacgcaatggcattagttatgggttaatcctggggcgagtcattggaaccaagcttattcaaactgactttaatgctgaatatgaaaaaggcagctatgcgggcaatgctgtgattaatgccgtgccattcagtaattacacaagcctgaatccttccgattatcagggcggtaaatataacgggctaagcgctgttatgacacctcgtcgtggattcgagtcaatcacgtttaacctgaacgtaaccaattttgtaggggcataaaaaaatggcaaacccgttagtatcacagggatttcttaaccgtgttcgtggcgcggtttccgtaactggcgatccgtctctgaatgttacagcatcatttcttggcaaagagggggttagtttgcgtcctgatgggccagcaaccgacatcttacccacgatgactggcacggtaggcagccaggcaccataccagcaggttacgttaacagttcacttacttaaaactcagtcgcttgctgctgcatatcaaaatcgctttgcgaccgatacgtcactcggggaaattgtagttaccccggatgctaatacctttgggaattacaccgttcttaatagttatttagttaacttcaatgaaataactatgaacggcatggatcctggctatgtggctacaatttctggctacatcattaccaacgataatatgtgggtgtaatccgtgaaaattgacaaaaatcttaacctggttagcaccatcatccgagatgggggtaatcctgtttatattcatgttaccccgttcccttatgaggttatcgaagagaactgtttgctgttggggaacatgttttcaaactttatttctcaagttggtgggctcggttccgctcgcattgccgccatgatgctacggaaaaaactcaagcaggagcaagagttgagtggatcttctggacctacaattgttgacgatattcaacgcttaaccactgtcatttataacgacaacggcgagtggaagtcatcaccttttgatgccgcgatgaagaataacgttatcaccgcagatgaatatcgagacactgaaggtgaaatagttttttttatggtgtcatctgccattcagaagaaggaactgatagccccaacagtgggggcggtgatcagtatgtacggtgggcaactaacatcatccaacgctatggaattccgcgcttccttgctgaagtcgaatcaggctaccgatacccaaccccagagtgccgagcaggaaacttcatttataccctcttagattgggctgcgaatgaggggttctggcgtgttatccgggaaatcactggggaagaattcttcagtcctgctcaatatcgccagcgcttcttaatcgcggcactcaaagaaaggggctttttcaatggcagctaagtcaatcattgatattgatgtaaatgacgataagttccagtcatttatggagaagttcaacgagtatcaagctgcccttggtgacctcccagaagcatggagaggtgtcgctcatggcattggtgatacagagaaagaaactgcgaaggtgcgatcagagttgcagggtgtagcaaaatcattctccgatggcgctgctgctattctgtcgataaatagcggacttgaccggttaaacgatagccttgataaagccaataaaaaccaatctggatttaacaagaatgcgagtgctgcaaagaaattcctgagtggtgctacgaaagatgcgaaatcgctggccggtcatatcaaggatgcaaccacaagtttaatttcatggactagcatccttggtttgttttctgggctgatcggcgctggcgggctattcgggattaatcgactggcctccggtgccgcatcacagagatttacaacacttgggttaggaaccacgtctggtggccttgactctaccgctatcaactatcagagagcactaagtaacccaacaggtacccttggtgctattcgagactcacagcttgacctgagcaagcgctggcagttccaggcgatgggtatcaacaatccagatcaggaccctgcaaaactgcttccacagatgatccgcaatgcgcgcgatatctttgttaaaaatggcagcaatcttcaaggggccgaggcccacggactgacaaactttttcaccctcgatgatctgaaccgctttaaaaatatgagcgatgcagaaattgattcgatggaaaaaagggccgctcaggacagcaaacaactacaactaagcgatcagattcaaaagcagtggactgattttaatgtccagttgcaacgtagtggttacagcatagaaaactcatttattcgtggtcttgcccctttggctccacagttaaccaggttgtctgattctgtttccgggatgattgattcatttcttaaatcaccagaactggggaaatggattgatggactctcacaaggaatccagaagtttggagaatacctagcatcaccatcatttcgaactgatatcgatagcttcatgaagtcaatccgagatatgggtctgactgtcgataatgtgattcgttttttaaatgggacaacactgaacggatggaatgattcagtagctgatagcgctaactcatcggctaagtgggttaaagagaaaactggttttgatccgcaaactgttggaccggcaattaaagatttattcagcattgggtctaaaaaaataaaagattggtattccggcggaagcattactccagttgacccaactcctgccgatgtcaccgccaagggccgaacaatagccgatcgctttaacaaccccggtaatttgcgctgggctgaaggttacgggactcataacactcaaagtggaaagtttgctgtatttccaacccttgatgagggggttctggcagccacgaagcagcttcagatatatggctctaaagggataaataacgttaaggatatcgttagcaaatgggccccatccaatgaaaacgatacagccgcttatattcgccatgttgttaaatcgacaaagttcagtgaaaacgaaaagctaaaccttaatgatccagccgttctggcaaaactaatttcagctatggcaacgaaagagggggccggaagcagggttactgagggggccgtcatccagatttataacaataccggtggcaatgccattgtaaatagcgctcagcttggagggtatggataatggctttcacgcgggagctttacaagcttggttttgaaatatcccctgtaattctgtgtgagggtgtagctcaaagcatcccaggagggatgctgccgatagtggctcttacacaaagcgcaagttttgttacgggactcatcggcggggctataaacctgacagacttggataagtatttctgccattggaagcccattcagggggcaactatggttgattacgatattgcccgatacccattcgctaaccaaacagtggctgcaaacgcgctattagcacaaccactccgagtatctctaatgatggatgcgccggttaatgagaacactggcgcaatgacaaaattagtgaccctaagtgcacttcagtcagttctgcaagctcatgccaaccttggtggcacattcattgttgcaacacctgcattgatatacagcggttgcatactgaaaacagtgaaagacgttaccagctataacgaagcgatcacgcaaaaatcgtgggtatgggatttcgagcagccacttgttactgagactggagccgagcaagccgttaatagctttatcggcaagatagacggtggagcaaagacaaccagtagcgcgtggacaagtacggctgcggcattaggaaatacctctcttggtggaagcgtctcaggcatagcaagtgaggttgtagggcttgttggaaaactgagtggagctttcggcttatgagtacagaatattatgatttttctggcaatgagcgggagagcatgtcgtttactccgtcgctggatgggacgatttataactgccaaataaaatggaatatatcggctcagagatggtatctgaacattacggataactcaggtaaccagatccttaccaccgcaatgatcgaatcaacaaccggtatggggattaaccttatatcgggagttttttcttcaacatccatgatatggcgtcagcctaatggtcgaattgaggtaacaagctgatgcgcttttacgatattcaaatatatgaccagaagggagctttatttcgtcagtattcaagccttaagaatggagttttcaatcctggcgggctgatggttgaatttgacattcaacgatttggagagtcaaccccacaagggcaaagctgcatcactgtttggggagttagcccacaggaaatgcagcaagcccagcaaaacatgtttggcatgactgtaaaaatgtttgttggaatgtcaaagggattgccgttatcgaagccatctcaaaaaggcttggttcttgaggggaccatctggcaagcatttggaaactggcagggaaccgagttacggcttgatttaatcgttgttgctggacccacatcgaccaccagtcagttacctatggctccgcttaatttaacgatgccatggggggtgggacagcagttatcggtagctttaactcaatgctttcagactcttggtggttcatacactcacaatataaacgttagtaaccgcttggtgcttccatattcaaggcccatgttctgtggggctcttagccagttagctagcgatctgaaaaacttctcaaagacaataattaaagattcatcttattctggtgttgaaattaccatcgttaatggaaaagagataagggtatgggataacgattatattaatcattcagataaaacatcattaaaaagtgccacctaccggaatggtcatccaactcaaatagaattcactgatcttataggtcagcccacctggattagatttggcacaataacagtgccatgtgtaatgcgagccgatattcaggttggtgaccatattttaatgccgaaaaaatcacgggcaatgattcaagcatcttcattttctcaattcagaaatgactctgcttttactggtgagtttatcgtgcaatccgttcgccttgtaggtaacagccggcaacccgatgcaaatagttgggtgaccatcattgaggcatatccttctacggagttggcgaaaaaatgaatgttagcaataagttgaattttaatagaaatattactcagtttgctgaaaacaaaataagcgaagcaatggagtcggctggtaaggtattgccagtaactgttatttctcagtcagggaaaatggtaactgtttcattcaatctcactaatatcccgtacacgctacctcaagtcactattcctatctttgggcctcaatatattcgctacccaatgcaatcaggggataaagggatcgtgatccctgctgacacctatcttggcggagtgagtgggcaagggggagggacggcagaccttacgcctcctgcgaacttaagtgccttggtttttttacccatcagcaataccgagtgggattcggttgatgggcaggtcctgacgctatacggaccagagggggtgactattcgggatggcggaagcaatacaacatttttgcttacgccggaaagtatcactattgccacgcctacacagtttaaagtcacagttggcagtacggtgctaactttgacaaacggcatgtggagcctttctggagaagctggaaagttagaagatgctaccgcaagtacaagtcctgcaattatgcatgagggctgggccggattggttgcatggtgtaatagccacgttcataccaacggtaatggcgggtcaaataccggttcaactacaacgccttttaacgggaatattactgaatgagaacttacggcagaaattcagagggccaatgggtgcttgttgaaactgatgataatggttttaatgattctgtttatctgacgacgcttattcaaaacctgaagctggccccgcaagaatcacccttttacgcgaataacggcatcccggctaatggctcggtcattcagcagatattgccgacttattacgtcaatagaatacagcaacaatttagccaatatttctcttctttgcagattgccatggtcagtgatgacccgccaatttataacatatcggctataacgaacgccggttcaaaaatcattgcacaggtgaatgtatgagtgatttgccagttagttacaatgcatcaggccctatcccactaaccgcaaatgaattaagagataaaatagtctccctcgccactgcgcaatcacctggaattacaactgatttgcccggatctttggtagaggatattgttagtaccagcgttggcgcacttctcgtttgtgatcaagccagagttgatttaattaactcagttggaccactaacggctaatatttttatgcttaatactctcgctgaacaatatgggataactgggcaaaaaacagaggggctgacaactgttcagattatttttagtggcccggcaggatttgccctccctcagggttttttggtttcagatggcacgcatcaatattcattatctgatacaaccataattcctgcgtcaggaacaacatcaccagttacttgtgcggcaacaatcacagggacatgggcagtaccagagaataccgtaaacaatatagccacaagcctgccatcagatatcgttattacttgtacaaatcaaaccgcagggatacccggtggaccaaccgaaaccgttgcagagttcagggggcgagtatgggaatcaggaatgagcacagtccaggggtatcctggctttattcgtcaaaaattaactgatttagataatgttcaggctaggcttgtctctgtcgtggccgatggtagcgattggataatcatgtgcggcgggggtgacattttttcaatggcaggggctatttacaagtcagcaggcgatattagccgattaaaaggcacttcactaaatgttacaggaataaccaatgcttctcctggagttattaccaccgatataactcatggatttagtagtgggcaggtcgctattattaatggagttacggggatttcagggatcaatggcacgcctttcaccattactgttataaattcccactcgttctctattggtgttagcacgacgggttccggggcatggactggcggcggggtggtaactccaaatttaagaaataacactgtaacaataaatgactggcctgatagctacgttataccttttgttcaacctttacagcagcgcgtaactgtaaaattagagtgggcaactgaaagtgtcaattatctaactgacgccacggtatcttccctagtggctgctccagtcatttcttatattaacggtatttatgctggtaatccgttaaatattaatagtataaaagatgtttttttgcagtccataaatgaaactctaaatatgagcttgattagcaatctcaatgtgattgttactgtaaatggcgttattactagcgtggatgaaaatacaaatataattagcggtgacagatacagctattggtttatttcagatgatggcgtgaccgttactggggggtgagatgcttgatgatattattcgtgcatatttatatcaacagtataatgatgatgaaaatcttcaggcttttgttgacgcatataacacgctgtcaaaagacatatattcatggatgaaagatgcgaatctccctgtttttgttggcggctataacgcaggcgatcagctcaggtggattgctttgggggtgtatggggttaggccacctatactggttagtgacaagcgccgcacgtttggtgattacaattcgcttttgtttaaccaattgccttttaatggacggatggttaaggatgaatctgagcaagtagttgcttcagacgatgtgttcaaaagagtaatgacatggaattactataaaggtgatggtttcaactttaccataccgtggctaaagcgccgggttatgaggtttttgaccggggtcgatggagtagatgttgttaatgatcagcggtggagtatttcggtgctgttttccacatcaggcgctaacatttcgattgttaaagggtatagaaagcttacaaactcgggggtatataattcattccccataaatactcgctcttttaatcagaacacaagcgtcctgattaaaagtaacgaatatgagtttgcatcactattcaagcaggctttcgatagtggacttttacatatgccattttatcagcctgtttctgtgaccattgttggttgaatggtatagaatttatcctctttcatagggttttagggatgatgatgaataagttatgttttttgttaattgtgtcaatttttctttcaggctgcgccgaaccacctctatcacagaagcgtgattttcttatcaaaatggctccttcaatttacaacccaatgggggcgagtattcctgtaaatattaatacagtccgaggagaaatgattgccaatggttgggagactgatgacttcttaaagagattatctgataaatgctatgatctttcatatgcagcttcaggttcatgcgcccttgatttttattacgatgagctaaaagaaaaaaaagaagaaaaagaagatggactgtgtagtaaaaacccagtttgcatcagagatagagagactaaatcggcaatacatgatttaaatcatatatattatcttgtcatggcaagaaaccaatatgaccaagctgaatttgatttgaatattagagcattatgcaaagccgctggcgttggacaaagggggggaattccattaaggcagattgaagaagatgtaaaccagcaacctggattgtctcctgaggtaagagggcagttcagggacattgctatgtcttgctggactctaagcaaaaacggtattacggatggaacaacacaaattaagaatgtgtattaataaatggcccaatttacgtaggccttttctttctggcgcgtcattgcgctgagcagcccactcaggtgggctttttattatgtttttcttcaataatttcagagaccttttttagtgactctgcaaacattgacgccatgtttttaagattactgccttgctgatcaagcatctcactctgcattctgatcacattccttagctccctagcatctcctgccgggaagcctgatttctccgcttcgattgcatcatcaagtatttgtactatctcggcgttcagtgatctgccgtttctttttgctctttcagtaagctcgcacttaagttcttgtgtcatgcgcaagttgaactgtggatcgtttctggccatgcatcctccgataaatagagttgacatactattacggtggtattatcttatcaataagaccacggtggtcttaagaaggaagctaaaatgaaagacgcacgtaagttgcctgtatttaatatacgaatgccaaaaagcgatatggatcttgtgaaaatggcggcagaaagaaatggacgctccattaactcagagatttatcagagattgatgaatagcctgaaaagcgagggatttgctagtgtgcagtgaaaacaacgaaacccggcagtgcgtcaacactagccgggcttctaatttgtcaaatactttcggagttatcgacatgtcaagtatagcaactcagatctctactatcaacgttcctttccatggtcaatctttggctacaattttccatgatggtcagccttttgtcgctatgcgcccaatcattgagaacattgggatagattggaccgggcagcttgtaaagctcaaaaatcagaaggaaaaatttgggtgtagagatatctctactcctacaaaaggtggcattcagaagatgatctgcattccattgcgcaagctcaacggctggttgttcagtatcaaccctgaaaaggttcgtgccgatatcaaagacaagctcattcagtatcaggaagagtgtttcagcgttctatatgaatattggtctaagggtgaggtaaagccgaaagtcagcaaaactacagtcaatgagcgcactccgcttcgtgacgcagtaaacatgttggtcggcaagaaaggactccgctatgacgatgcatacaatatggttcatcagcgttttaacattgatagcattgacgagcttgagcttaatcaaattccgctggctgtagaatatatccatcgtgtggttcttgatggtgaataccttggcaaacaggaagcggtgccagccactgttaagcaagtacagttcactaatgatgaactgtgcgcattatcttggttgtggcttgttgctgataaaatgcgtcgacacgcggaagaaacgtacccagcacttaaacagcttgaatcgaaatacgctggcgatgcctgcgatattgctcgtgagttcaaatattggctagggaataccgaatcaattctttccagagaaactcggcatattgctaaaccatctggacgcgagggttgctactcgtctttagcttacttgagagagaatcactggaacccactacctcgttaaaaacccagattgttgaactaaacctaacccgcttatgcgggttttttattatcttaatatcaggagagccaaatggccttgacactcttaacatccaataacgcatcgacagtattggcgtccggcatcagcgcgaccgcaacgacacttactgttaataccggcaccgggataatctttccgtcacctagcccggggtctagttacttcaagcttactttagttgatgccgctacagggacattaacagaaatagttcatgttacctctcgttcgggagatgtcatgacgatagttcgcgctcaggagggtaccccagcaaggttgtggtctgctaatgacattgcagccaatatgttgacggcaggcacaattgcgcaactggctcaaaaagatttatcactacaaacagccaataacttatctgaaatagcaactgctggtcccgcagctgtggctgctgctgtagctaaccttggcttaacagaggccgctgccgccgctgctgatgctctgaagaaaagcgccaacctttctgacttggcgagcaagccagcatcaaggaccaatcttggtcttggcaactcatccacaagggatgtggcgcttgtatccgactatccgatcggcacagcagacaaggttgttactcttccagggctggtatcctatgcgctagctcaatcaaaaaacttgtcggatgtgactaacgcggctaccgctaggaataacttaggcctcggaaattcttcaacattagatgtggggagtgcggctaataccgtggccgccggcaatgacacgcgcattactggagcccttcaaaagacgcaaaatctgaatgacctttcggacaaaccccagtccagggttaacttaggattgggtaattcatccacacgtgacgtagcaacctcggcagaaatccccgtcggtacggcagataaggttctcacgttgccggggctaatgattctttttggaaaaataaacttcactggtaatagtttcatcaggataccagaccgtccgggcgggttaattatccagtggggcaaggcaacaggcctagctactggaacatcattctccacggtcacctttccaactgcattccccaattataccggttcagtcattaccactcgaaattatagtgctgccgccactggtgctcaggcaaaccaaaccgtgaggaacgtcaccagcacaacatttgaggttaatgcggctgatactgtggttgtggatttattctgggttgcttttggctactaaataacgaggttgtgatgtcatatttatttaataaaaagacaagccggtttttggcaaaaaatatggtcgatgatggtagctacggtgaaattaaagactcagacttaatcatccccactgacgatgagatgactatatatcacgccactgccgcaccacaaagaaaactattggggacggtaaagggcaggccagcctgggtcgatgcaccagagatgacgccagaggaagttctagttgaggcaactagtcagagatcggcgctaaaggccaaagctgatagtgaaattgaatggcgtcaggatgcggttgacagcggttcgcctgaagggacggaagcaaatgatttggcaaaatggaaggagtatcgaatctctttaatgagattggatatatcgactggtaaaagcatagagtggccagcaatgccggattagaattttttattggcagggacgccgaggtgggagtgtgacagatttgtgccaaaacaatgacacaaaatggcgcaaatcagcaaagcacgacaaacaccacttaagctggctggcttgtgtagcggcttagacagttgctatcatgcgttccttttaatcacgcgtcagactgtttatctgatgctggaggttctgtgaagtacgaattacaaaaaaccgatgggcgtgctcgtcgtggccgtttggtctttgagcgcggcgtagtggaaaccccggcttttatgcccgtgggcacctacggcaccgttaaaggcatgacgccggaagaagtgaaagaaaccggcgcgcaaatcctgctgggcaatactttccacctgtggctgcgtcctgggcaggaaatcatgaagctgcacggcgatttgcatgattttatgcaatggcacgggccgattctgaccgactccggcggtttccaggtattcagcctaggcgcaatgcggaaaatcaaagaggagggggtgcatttcaaaaacccgatcaacggcgattccgtgttccttagcccagaaaaatcgatggaaattcaatacgatttaggttcagacatcgtcatgatttttgacgaatgtacgccttatccagccgattgggattatgccaagcgttcaatggaaatgtcattgcgttgggcagcccgcagtcgtcaacgctttgatgagctgaataataaaaatgccttatttggtattattcagggcggcgtttacgaagatttacgtgatgtatcggtaaaaggactggtagatatcggctttgatggttacgctgtgggcggcctggcggtaggtgagccaaaagaagatatgcaccggattcttgagcacgtttgcccacagattccagcggataaaccacgctatttaatgggcgtcggcaagccggaagatttggttgaaggtgtacgccgcggtattgatatgtttgactgcgtgatgccaacgcgaaatgcccgtaacggacatctgtttgttaccgatggcgtggtgaaaatccgtaacgccaagcataaagatgatacgtcgaccctggatgctgaatgtgattgctacacttgtcgcaattatagtcgcgcctacttgcatcatctggatcgttgcaacgaaatactgggtgccagactcaataccattcataatctgcgttattatcaacgcttgatggcgggtttacgtcaggctattgaagacggtaaattagagagcttcgttgaagatttctatggtcggatcgggaaacctgttccaccattaaacgtttgatttagaaattattaacttgtaattatagattgaacggttaggattttgcggttactaattttaacacactgatgtcacactactgatattgataacaatgagggaattttaatgagtcttttcatttctgatgctgtcgcatctgcaggggctccggctcaaggaagcccgtactccctggtaattatgctggtggtctttggtctgatcttctacttcatgatcctgcgcccacagcaaaaacgttctaaagaacataaaaagctgatggactctatcggtaagggtgacgaagttttgaccactggcggtttgatcggtcgtgttactaaagttgcggaaactggctatatcgttatcgcactgaatgacaccactgaagtaatgatcaagcgtgacttcgtggctgccgttttgccgaaaggtacaatgaaggctctgtaattttcgattttccctaagggaactaccgtgttgaaccgttatcctttgtggaagtacgtcatgctgatcgtcgtgattctcgtcggtctgttgtatgcgcttcccaacctttatggtgaggatccggctgttcaaatcactggcgcgcgaggtatcgccgccagtgaaacaacgctggaccaagtccgtactgtcttggaaaaagacaacatagcgagcaagtctattgccctggaaaacggtgcaattctggctcgctttaaagatcctgatgttcagctgcgtgcccgtgaggcattaatgacagcgctgggcgacaaatacgtgattgcgctgaacctggcaccggcaacaccgagctggctggccagactgggcgctgagccgatgaagctgggccttgacctgcgtggcggtgtgcacttcctgatggaggtggatatggacacggcgttaggcaagctgcaagagcagacaatggataccctgcgcagcgatttgcgtgaaaaaggtattccttacgctgcggtgcgtaaactcgataattacggcgttgaagtgcgttttcgcgatgacaaagcccgcgatgaagccattagctatctttcttcccgtcaccgtgatttagtcatcaactctaacggcagcaatacattaaaagccgtgatgagtgacgatcgcctgcgtgaagctcgggaatatgctgttcagcaaaacattacgattctgcgtaaccgtgttaaccaattaggtgtggctgagccattggttcagcgtcagggtgccgatcgtattgtggttgaattgccggggattcaggatactgcccgtgccaaagagattcttggtgccacggcaacgctggaattccgtttggttaataccaacgttgatggttctgttgccgcctctggccgtgtgccgggcgattcagaagtgaaaaatacccgtgaaggacgcccggttgtattgtacaagcgcgttatcctgaccggcgaccatatcactgactctacttccagtaccgacgaatacaatcaggctcaggtgaatatttcacttgatagcgccggtggctctaccatgtccaatttcaccaaagacaacatcggcaagccgatggcaactttgtttgtggaatataaagacagcggtaagaaagatgccaacggtcgcgccattctggttaaacaagaagaagttatcaacgtcgcgaccattcagtctcgccttggtaacagcttccgtattaccggtattgataacccgaacgaagctcgccaactgtctctgttgctgcgtgccggtgccttgattgcgccaatccagattgtggaagagcgaactatcggcccaactttgggttcacaaaatattgcccagggtctggaagcctgcctgtggggtctggcggtatctatcctgttcatggtggtttactaccgtaaatttggtgtgattgctagtaccgcgctgctcgccaacctggtgttaatcgtcggcgtgatgtctctgctaccgggggcgacattaaccatgccgggtattgctggtatcgtgttaacccttgcggttgcggttgatgctaacgtactgattaacgagcgtattaaagaagagtttaaaaacgggcggtcgattcagcaggcgatacacgaagggtacaaaggtgctttctccagtatcatcgatgcgaacgtcacgacgttgatcacagcgattattctgtatgctgtgggtaccggttcgattaaaggctttgctattacgacagcaatcggcgttattacgtcaatgttcaccgcaatagtgggtactcgtgccatcgtcaacctgctttacggcggcaagcgcgttaacaagctgtctatttaaggagtacgttgtggcacaggattatactgttgagcaactgaactatggccgtaaagtctatgactttatgcgctgggacaacgtggcctttggcatttcgttgttgctgttagtggcatccattgcggttatttctgtaaaggggtttaactggggattggatttcaccggtggtacggtgattgaaatcaacctggaaaaaccagcagatcttgatcaaatgcgtgacactttggaaaaagcgggctttgagtcgccaattctgcagaacttcggtagtacccgtgatgtgatggtacgtatgccgcctgcgactggtactgcgggtcaggaattaggtaaccgtgttatttcggttatcaatgaatctgttgataagaatgcaacggtaaaacgcatcgaattcgtcggaccaagcgtgggcagtgatttggctcaggctggcgggatggcgcttctggtggctttgctgtctatcctggtttacgtcggcttccgttttgaatggcgactggcgctgggggcggttatcgctctggcccatgatgtggtcatcactatgggaattctgtcgttgttccagatagagattgacctgaccatcattgcttcattaatgtcggttattggttactcactgaacgatagcatcgtggtatcggaccgtattcgtgagaacttccgtaagattcgtcgcggaacgccttacgaaatcatgaacgtgtccctgacccagacgttgagccgtactattatgacctcggcaactaccctgatggtggtactgatgctgttcatcttcggtggtgcgatgctgcaaggcttctcactgaccatgttgatcggtgtatctatcggtactgtctcatccatttatgtcgcctctgcattggcgctgaaattgggtatgaaacgcgagcatatgctacagcagaaagttgagaaagaaggggctgaccagccttctattcttccttaaccaaaggcgttagagttaatctttgggttaactccggcgtaataaaaagccccgagaatcgtggactgtagtccaaaatttcggggctttttgcttttaaaccacagtgaaagacggtagcactggttcctgacatctggaactcgtgaagctggccaagttgaggctgagcgggggctggtctgagcactggcgttttagtggctagaaacctttattgagcaggaagtaaagactcgcttaccgcgtctctttcggcatcagcggcgttaaccacctgatgaaaacgaatataacctagctgttccggtgtgagaccgctcagtcgcaactcaatggtgtgttcggtttttggcaaaagagaagcgctaatagcgacgggctgtgacaaaacgtccgcagttaatggctggcctgtcgttggatccaattgtccccactcaacgttggcgctcatggctgggagcggttggtctgtcaggctacggatatgcagcaatgcctgagatccattcgcttcactggagatatcggtcagtgaaaccccaagtttgccgacgctgctgttcaacaccgcaggcgtattggcagccggcaacaggtaaacgccgttaagcgagcggcggttcagcgtgttttgctgctctacggctaatgcttgattggtcagggtttgcagtttttggcttagctggccaacctgatttttcagcgcgggaatctctggatcctgcgcacaaccggccagtactatcactgcggccaataaacaaattcgaggataactggttgtcatcataatgatttccttttcagtatatctatcatctagcttagccccgataaatgggaaagtcattgccaggtcgaggtcttacacataatttcaccaataactgcgcaacgctacgcaacaaatgggcttgagcctttgttgtcgtggcacttcgcggtaaactgtaggcaaatttgggaacaattatcaggaactgctatgcattgcccattttgtgccgccgttgataccaaagtgattgactcccgtctggtgggtgatggctcacaggttcgccgtcgccgccagtgtctggactgtaatgagcgctttaccacttttgaggtcgccgagttggtgttgcctcgcgtgatcaaaagtgatgatgttcgcgaacctttcaacgaggataagctgcgacgcgggatgttgaaagcgttggaaaaacgccccgttagctcggacgacgttgaaatggccattagccatattaaatcccaactgcgggccaccggcgaacgtgaagtgccaaccaaaatggtgggtaatctggtgatggaagcgttgaaaaaactggataaagtcgcctatatccgcttcgcatcggtttatcgtagctttgaagatattcgtgagtttggcgaagaaattgccagattgcaggactgattctttcagagtgggttctttccgtagaatttaaggattagcatgcattccgaccagatttatatggcccgagcttttgaactggcgcgtttagggcgatttacgacttcgccaaaccctaacgttggctgtgtgatcgttcgggatggtcagatcgtcggagaaggttaccattttcgtgccggtgaacctcatgcggaagtacatgcgttacgcatggcaggagacgccgctaaaggtgcgaccgcttatgttacgctagaaccttgcagccatcacgggcgcacgcctccctgcgcggatgcgcttgtcgctgcggggattcggcgggttgttaccgcgatgcaagatccgaatcctcaggtcgcagggcgcggaatgtataggctcaaacaggcgggtatcgaagtcgtggatggggtgatgctggccgaagccgaggcggttaaccttggtttcctgaagcgtatgcgtaccggatttccttatgttcaattgaaaatgggggcgtcgctggacggtaaaaccgccatggcatccggggaaagtcagtggattacttctccgcaggccagacaagacgttcagcgttttcgagcccaaagttcggcgattcttagcaccagcgcaacggtgctggctgacgatccttcgctgaccgtacgttggtcggaactggatgcagaaacccaacgaatttacccgcaatcggcgctacgacagccaactcgtattattctggatagccagaatcgcgttgctccaactcatcaggtggtgcagcaggagggaaactgctggctggcaagagtcaaggccgatcagcagccgtggccggatagcgtcgagcaggtattgctcccacatcacggtaacggcatcgatttggtcttgctgatgatgctacttggcaaacgccaaattaactcggtctgggtggaagccgggccacagctggccggcgcattattgcaggctggcttggtcgacgaacttatcctctatgtcgcgcccaaattactcggtgatagcgcccgtggtttatgccatttgcccggaatggatcaactttcccaggcccccgagttcagctttagtgaagtgcggcagataggccctgatttacgattacgcctaaaaccgaggtattaaccccaatttatggtaggagattttcctaccggtggccgtcttgtcgggcgttttacaaatgcgcaggcgcaggcagcgaaagaatatgatagaatccgcccccctgcggggtatgaaccgatattgaggaaagctatgaacgttatcgaaggtgttgttgctactcctactgcccgcgtggcgattgcgattgcgcgttttaacaactttatcaatgacagtctgctggaaggcgcaattgatgccctgaagcgcattggtcaggtctccgacgacaacattaccgttgtttgggtgccgggtgcctatgagttgccgttggctgttaatgtgttggcaaaaactaatcgttatgacgcggttatcgctctgggtactgtgatccgtgggggcactgcgcactttgagtttgttgctggtgaagcaagttctggcttggcaagcgttgccatgaacagcgatatccctgtggctttcggtgttttaaccactgaaagcattgagcaggctattgagcgcgctggtactaaagcgggtaataaaggtgcagaagctgccctgaccgcacttgaaatgattaatgtaatcaaagctattaaaggctgaatttagttaagttaaggggaattctgtgaaacctgctgctcgtcgccgcgctcgtgagtgcgctgttcaagcgatctactcatggcagttgtctaaaaacgacatcgctgatgttgaattacagttcctgtcggagcaggatgtcaaagatgtagacatctcctattttcgcgagttgctgtccggcgttgcggtgaatgtaaccgcgctggatgctgcaatggcgccgtatctgtcacgccaactcgaagaattaggtcaggttgaaaaagcgattctgcgtcttgcgatttttgaactgagcaaacgtgatgatgtcccttataaagtggcaatcaatgaagcgatcgaactggccaaaattttcggcgctgaagatagccataaattcgttaacggcgtgctggacaaagttgctccagtcgtgcgtaaacgaaaataatcgcattacatcaacgatataaattaaggccggtttccggccttaatttatatatcggctaacctttctggaattgtattatggcatgtggcgaatttgacctcattgctcgctactttgaccggttcaggagtaaccgccgggacgtggagttgggcattggcgatgactgtgcgctactaacagtcggtgaacgacaactgttagcggtcagcacagacaccttagtgtcaggcgtccatttcttaccggatattgacccggcagacttgggctacaaggctttagcggtaaacctcagtgatttggcagcgatgggcgcggacccagcctggctttctttagcacttaccctccctgatgtgaacgaatcctggctacaggcattcagtgacagtctgtttgatcaactcaattactatggcatgcagcttatcggcggtgataccaccagtgggccgttaagtatgacgctgactattcaagggcttattcctgcgggcagggcgttgacccgatccggtgccagaattggcgactggatttatgtcagtggcaccttgggtgatagcgcggctggcttagccattctgcaaaatcagctgcgggttgaagatgcgaaggatcgggctgaactgatcaatcgtcatctgcggccacagccacgggttctgcaagggcaggcattgcgggatttggctaattcagccatcgatatttccgatgggttgatttccgatctacagcatattttgaaagccagcaactgcggtgcacgtatcgagctggacgccctaccttattcagatgcgatgaaaaatcaggttgatcctgagcaagcgctgatttgggcactcagcggcggtgaagattacgaactgtgctttaccgtccctgaaatcaatcgtggggcgttagatgtggcgctcagccacgccggagcgggctatacttgtattggtcagatagctcctttatccgaaggggtgaagttctttagcgatggcaaacctgttgacgtcggtttgcgcggtttcgatcactttaccagccaaggctaaccatggatgaggcgaagaaacgtctgcgattaaccaatccttggcatctgctggcgactggttttggtagcggtttatcgccgtgggcaccgggcactatggggtcgattgccgccattccattttggttgctgttgatccaattgccttggcaactttactctctggtcgtgatgtttagcatttgcattggcgtttatatttgccatcgaaccgctaaagatatgaaagttcacgatcacggcagtatcgtctgggatgagtttgtcggaatgtggatcacgttgatggcattaccggtgaatgactggcagtgggtgctggcggggtttgtcgttttccgtattctggatatctggaaaccttggccaatccgttggtttgaccgaaatcttcatggcggtatgggtattatggtcgacgatatcattgctggcgtgggggcagcggcagtgatttattttatcgggcaccaatggcctttagcgctttttggctaataccagaacaactcatagcatggcaagtcactaaaaaatttagctttctttccgtggtgtgggttaggtttatctgatgagaatatgctaaatagaaaagggcatagcgtttaagctgtgcccttttgcgtgatatcagccccaattatgggtaatggccgattaagctagccagtcttcaattgtcttctgaatacccgctgcgcttaaaccaaattcggcgcgcatttcatcctgctcaccttgcggaataaagcgatcgggtaaaccgatattgagtaccggaacttgctggcgttttgccattaacagctcgttaataccactgccagcgccacccatgattgcattctcttccagcgtaaccagtaaatcgtgacgggctgccatttctaataccagctcttcatctaacggcttgataaagcgcatatccactaatgtagcattcagattttctgccacctgctgcgcttcagaaagcaatgtaccgaagctcagaattgcgactttttcaccctgacgacgcacaatacctttgccgataggaagagcctgtaatggctctaaaactgcgccagtaccattcccgcgagggtagcgtaccgccgctggaccgtcgtagtggtagccggtaaataacatctgacggcattcattttcattgcttggcgccatgatgaccatattaggaatgcagcgcataaatgatagatcgaaagcgccctgatgggtttgtccatcagcgccgacgataccgccgcgatcgatagcgaagagtaccggtaaattaggaatagccacatcgtgaatcagctgatcgtaagctcgctgcaagaaagtcgagtagatcgctacaaccggtttatagccaccaatcgccagaccggcagcgaaggtcaccgcgtgttgttctgctatggccacatcgaagtactgctgcgggaattcacgggagaaccgcaccataccagagccttcgcgcatagcaggggtaacggccatcagttggctgtctttttcagccgtttcacacagccaatcgccgaatattttggaataggtgggtaaatcgcttttgctttttggcaaagtacctagcgcaggatcgaacttaggtaccgcatgccagccgataggatctttctccgctggtgcgtagcctttgccctttttggtcataatatgcagaagttgcggccctttgaggctacgcatatttttcagcgtttgggttaaagcttgtacgtcgtggccatcaaccgggccgatataattaaagccgagctcttcaaacagcgtacccggaaccaccatacctttcagatgttcttcagtacgtttgagtagttctttaatcggcggcaggccggagaaggctctttttcctccttcgcgcagcgtggaatacagttttccggataataattgggccaaatgattattcagcgcgccgacgttttcagagatcgacatctcattgtcgttgagcacgaccagcatatccggattgatatcaccggcgtggttcatggcttcaaacgccatacctgcggtaatcgcgccatcgccaatcacacagacggtacggcggcctttaccctcacgttcggcggccacggccatacctaagccggcactgatagacgtggatgaatgcccgacggataacacgtcatattcgctttcatcacgccaagggaaaggatgtaaaccctctttttgacgaatggtggcaatacgatcgcgtcgaccggttagaatcttatgaggatacgcctgatgaccgacatcccacaccagatggtcgaacggcgtgttatagacatagtgcaaggccacggtcagctcaaccgttcccaaccctgacgcaaagtggccgctagaacggctaacagagtcgagtaaatactgtcgcagctcatcgcatagcttgggcaggctttcttttggcagtaaacgcagttcctcggggttctccgcaagtgccagtgtcgggtatttggctatatcaagactcattcgatgctcatatcagaggtgtttacgtaggctgctgcattaccattcccggcagggcagtgccgggatcagaaatcgtctgaacaccggtgcgctggcggcagaatattattctgcacgagtaacgcctactggattaattgtttctaattatcgcgttcaattataaaactcgctagcgcccgcagtgaggcggtgtcatacgacagttcagccaaagcatccagcgcttcgagataaagatctctggctttggtttgggcagcttccagacccagtagggccggataggtgcttttgcctaactgttggtctgaaccctggcgtttgcctattgtagcggtatcaccgataacgtctaaaatatcgtcctgaacctgaaaggcgaggccaatggcatcggcgtagcgatctaactgttccaaagcccgatggccgggttttcccgcagccaatgcgcccatgcgcaccgcggtacggatcagcgcgccggttttatgacgatgaatttgctccagctccgtcagtgaaatatggcgctcttctgctgccagatccaatgcctgtccgccacacattccggctacgccgctggattttgccagttcggacagcatgctgacgcgatcctgcatggcgacgtccggcattggcgcatcggctaaaatgctaaatgccagcgtttgcagggcatcgccggctaaaatcgcgcaggcttcgccaaatttgatatgacaagttggctgaccacggcgcagatcgtcattgtccatcgccggcaaatcgtcatgtatcaaagaataggcgtgtatacattctaccgctgccgctggcgcatccagcgtcgagagcgacaaaccgaacatttggccggtggcgtacaccagataggggcgcagtcgtttaccgcccaacaacgtgccataacgcattgcttgcactagctcgctgtcgttaaacggcagcggtgcaataaaactcagtaatgcatcattagctcgttgttgatatatcgccaactgctctgtaaaaacaacgggttggttcatttcgttctgatgggacatgtttattcggtatccggcgtaaaaggcgtcagcggcgcatcggtgtcatcactgagcaatatctgaacccgttgttctgcctgcaacagcgtttgctggccttgacgagccaactgtatgccgcgttcgaattcgttaagcgcatcttccaacggcagttcacctgactccaggcgggtcacaatttgctccagctcgctgagtgaagtctcaaaactggcgctactttttacggtagcctctggcttatccgtagcttctggtgatgcagcttttctaggcatattttattttcaacgttaagttggcgtcatggggccggtgggccactctcggttttgggctattgtaacgaattatgccgagcaaatcgtggcgtttgcttcgggttttattaagcagatatccactatatggtgatatactccgcgccttgaatattattggtaaggcagacagcccggagttagccttaacgataacatcgtccatttactcagtgactcgctatttaccgctgcgtcgtccggtcattttgactcaacagtattgttctttcgatagcaacctaattcactcatcatactagacaactaaagaccgccatgaagtttatcattaaattgttcccagaaatcaccatcaagagtcaaactgtgcgtttgcgcttcattaagattcttactaccaatattcgcaacgtgttgaaacaccttgatgactcgctggcggtggttcgtcactgggatcatattgaagtgcgtaccaaagatgaaaatcttggccccgcgatctgtgacgctttaacccgaattcccggtattcaccatattttggaagtggaagaccgtagttacaccgatctacacgatattttcgagcaaacgctggaagcttatcgtgacacgctggtgggcaagaccttctgcgtgcgggtaaaacgccgtggtaagcacgagttcagttccggcgaagcagagcgctacgtcggcggcggtctgaatcagcatattgagacggctaaagtgaaactgactgcgcctcaggtcacggtcaatctggaaatcgatcaagataaactggtgctgatcaaagctcgtcacgaaggtttgggcggtttccctattggtacgcaggaagatgttttatcactgatttctggcggttttgattccggcgtgtccagctatatgttgatgcgccgcggctgtcgggtgcattactgcttcttcaatcttggcggttcagctcatgaaattggcgtaaaacaggtggctcattatctgtggaaccgcttcggtagctctcacaaagttcgttttgtggcgatcgattttgaacctgtggttggggaaatcctggagaaagtcgaagacggtcagatgggcgtagtgctgaagcgcatgatggtgcgagcggcttctcaggtcgcggagcgctatggcgtgcaggcgttggtaaccggtgaggcgctggggcaggtttccagccagacgttgaccaacctgcggttgatcgataacgcatctgacacgctgattctgcgcccgctgatttcccatgataaagaacacattatcaatttggcgcgcgagatcggtaccgaagactttgccaaaaccatgccggaatactgtggtgtgatttctaaaagcccaacggttaaagcggtgaaagctaaaattgaggaagaagagtcgcactttgatttctcaattctcgatcgtgtagtgagcgaagcgaaaaacgtggatatccgcactatcgccgagcaaagccgcgaacaggtggctgaagtagaaaccgtagcagaactggctgataccgatgtggtgctggatattcgcgcgccggatgagcaggaagagaagccgttggttttggctccggtagaagtacggaccttgcctttctataagttaagcactcagtttggcgatctggatcagagcaaaacctatttgctgtactgtgagcgtggcgtgatgagccgtttgcaggcgctatatctgcgtgagcagggctacaagaacgtaaaagtttatcgtccataactgagacggtatctgattctgaaagggcgctaatgcgccctttgttatttccgaaagctaatagcgatagtcttttttatcgatgccgtatttcttcatccgtagatagagctttttgcgcggtacttgcaaatactctgctacgtcgttaattcttccctgatggatatttagcgcctcattaattatcttcagctcatactgttcaattcgttcatccaacgggccacagtcagtttcagtcacccattccatgctggtttcggtcaatggcgtcacgccaacggcaaataattctgccgcgtttaataactctcgaatatttcccggccacggacggcgacacaacctttttacgaaagcctcactcagctgtggctgctggcgatccagacgtttacaggcattttccagataatggcggaatagtacctcaatatcgccagggcgctttgccaagggtaaacactcaatatggctaagagaaaatcgatagtagagttcgggaaccagcaattgctgagcggccaactgtgcaggtaaggagttgctcaaagcaattaaacggaaatgacattcttcagggttttgcagttgcgccaaagcacgctgttgctggctggcgagccgttcaatgttttttactaccaatgtaccgttctgtacctgattgatgtaactattgaggtcgatattctcatcgctggtaggatcgatgatgatcaacggattattgcggcgttggctcagttggtgcagatagcgtgccgccagagagcggccggttcccagctcaccgtaaaaaaataccggcacatcaatatcggccagcatctgcaggcgttctcttagttgccgaacccaaccgctgttgcccaacagatgttcgctaagctgctcccgctgccagtgacgacgagcaatcagagcctgtctatctgccagcgccagctgaacgcattgcagtaatttttccggattgactggtttttccagaaagttataggcaccttttttcaccgcctccaccgccatgggaacatcgccgtggccggagatcagcaatatcggcagatgacgatctttggcgagcaaaatttccagcagagccatgccggaaaggtttggcatacagacatcgctgatgaccataccctgccaatcggtggtaataagttctgctgccgcctgcggtgagctgtatgccgctacctgataaccttcttgcgtcaggatctggcaataggcgtccagcacatcaatatcgtcatcaatcagtaaaatttgctgttcatcagttaacatggctcagactcctgaattgcaatatcaccattccgtggtggtctaatgttgacgccaaccgcagctctcctgcgcactgctccataatggactggctaatcgatagaccgatacccagtcccacttctttgctggtcgtaaaaggtttaagcaatcgatccgccagcgctagcggccagccctgaccattatctcgcagagtcagcaatagattttctgcctgttgttcgaaagaaacctcaatgattggcggatgttgagcgctggcttctagcgcgttggtcaataagttgaccaacacttgctgaatacgaatatcgtcgccgtataccaaagggaaactttctggctggatgaaccgcgccttgagtggacgatgacgcaaggataaaagatcccaggccgcatccagattggctcgtagatcgatggggtgtaactgttgatgtgcatcgctgcgacgggagaattgtcgtagctgcttaataatattcacaatacgcagaatcaaaccgcgcattttatccagattggcctccagcatggcgttatcgccgtttttaagcgctttttcactgctgaataaatacagcgacagggcattgagaggctgatttacctcatgagcaagggtggtcatcgtctgcccgactaccgccagtttagccgcctgaatcagttcatcttgcgcagtacgtaaatccttctcaatgagccgtctttcatcaatctcttgtttaagctgatttttttgctgattaatctggccgatggtgcggcgcagtaatccagcaattcgccccagttcgtcccctccgtagaccggaatagttgtatccagttcgccgcagcctaaacgcgctaccgattgatttaacagggtaaagcgtttgatcaagcgtgagcgaatatagaaatgattgagcgtaaaggcaaacagcagagccaggagggttgcgacaataatcagcaggccgctgatgcccataatatcgccgaggcgttgattgaaggtttgtaactgctggtggctgttgcccaactggttttcaatctgactgcgaaagcgagtgagggtttgctctttcgcattcacggtttcctccagcaatgccagcgccgttgcccgttcttgcaaaatagccggcatttttagctctgcggtgcctaaattgagcaattcatcgatagtctggcgcagagtgatggtgctgggatgttttgccaacgattgcatgttggattccgcagtttgctttaggtagctcaggtaacgaatgtgattattcaggctatcaatattcggattggccagttgttcgcgcagatcgtcaaccacctgagtttcaatgtgcgcaagggcgtaaaccagctgtaattcatcctgaacattgcgcagcgtactttgcaactggtgatttttttccagactggttttctgcgttaattgatcgatgagcgagccttgctgccagctaatatcctgagaaagcgacgttagctcggtattgaaatcatcgtgaagccagttaatccgtgctgcgagctcggtgatcttttctctggcgaggaaattactgtatagcgcactatccaatcgagaaagcagttcccgacttcgggtcaacgtcgttgccaactggcgctggctgtccggtgtcagacgtcggctggccatttcgatggtatccagccgatgagcaatctgatcgcgcatttgaatacgcgccgttgtgttgggggcatgctggaattcattcaattcctgaatgagtgcattcagattttcttccagctgaaaggacgcctgaattttaggaaagtaatcatccagcgcatagcgaatctggctactttgggcgtgccatgaatacaaactgacggcgctgacaaacagagtcagtattgcaccaaaggcaaatgcccagcgcaaaatagagctgatagtgatgcgatagaaaagcgggttcatttcagcgattccaactgttggatcgccaaatgctgctgtttttggaagaactgttgccaaatcattagctctgactccattgcgttatccggcccctggttaaagcgttgcagataatccatatccacagcctgctgcggagtgacgggtacggcggtcagcaatgcccggatttccggcagagggcgttttagacgagcttcggcgctgtgcaaagctttccacgcatcctgtagctggtgcaggcggaaagtgatcgcggtatcaaacaattgctgcacgagtttctgccgttgcaggatctggcgataatccagcggcgtttgctgtaataagcgctgttgctgtttggcgcgcggatcttcaacgggtaacggggaaactggatacttgccggtatcggtatctgaaagtgctttttgcccgctgtcactcagtagaaaattgatgaaacgggcggcgtcggtttggcgcgagctgcctttcgtcatggcgataaaagtcggtgaagcgccgctttcaggaaagtaactgaaactgagctgcgggtcttttagcaacagagtggcgtaattatcgataatggggccggcaaggccgagtccggttttgattttattggaaacgccaaaactgcgggaagaaattgtggccagattaccggaaatttccagcagggtttcccagccttgctgccagccccgttgctgtagcaatgtttctatcatcaaatggttagtgtcggagcgagaagggctgctcattaaaatcatcccttgatagcgggcgtcttttaatccgtcccaggtgaccggcgtgggtaaatgcttttcttttaagcgtgcgctattggccagaatgccatagccggaaatggctaccgccgccgtggagctgcggatggattctggaacgcgttgctgattatgtactgccagcgtaggcaaggtagccaaacgctgatgatcctgcaaatgctgcatcaacatcggggatgaggtcagcaccaaatcgatattttcccccattggcgtatccagtaaacgctctagggaagagctagtgcgatttagcgttcgaatagaaactgcctgcggctgtttatgccattgcgcaatgatatgcgcggtagcttcgggggagaaggtggtggcaataaccaattcattagcgtaactcgcgggagctaaactcagggcaataattaggttcaagagaatgttgcgtaaactttgcatctatttattcgccccggttaatgtgtgattaatatcaaataaataacaaataaatatatttatagcgatggccggattgttccaatttgtcccatttttgtcttttttaacgcgtaaaaataaagaaagacaaaaatgagttaattttgactcataaattttgggttgttgtgtcaattttgaaacatatcccttaggttgcaccaattcgtcagtcgctgcatgctgactgcgaaacataatgacgcagtggcgctgggattatcaactgctttgtagtatcagacactttattttattcagacaatgtctgcgataacagacttattggcttcaacgccagggaaatccatttttctaaataacaatttaataataaatctttaaggtgaactatgctctcatttatgaaacccaagatagcaacccataaagttcccgacgataaagtaatagctacatataatcgttatcgggttcaggcgttgttcagtatatttattggttacctttcctactatattgtgcggaataacttcacgctttctacaccttatttaaaagaacaattgcacttaagcgccacggaaattggcatgctaagtagctgtatgttaattgcctacggtattagtaaaggcatcatgagtagtttggcggataaggccaatcccaaagtttatatggcaatgggtttgctactgtgcgccttggtcaatgtaggattggggtttagcggcgcattctggctgtttgccgtattagtcatctttaacggtttcttccagggaatgggagtcgggccttcctttattactatcgccaactggttcccgcgtcgtgagcgtggccgggtgggggctatctggaatatttcccataatgtaggcggcggcgtggtcgcacctatcgtcggcggcgcattcgcaattttaggcagtgagcactggcaaaccgctagctatatcgtgcctgccattattgcggtgattttggggtcaatggtattgctgttgggcaaaggttctccggttagtgaaggcttacctccgttacaggaaatcatgccggaagccttggtgattgagccagttaaagccgggcagaaagcaccggaaaatatgtctgcattccagattttctgtacttatgtactgaaaaacaagcatgcctggtacgtgtctttcgtagatgttttcgtttatatggtgcgtttcggtatgatcagttggctaccgatttatctgttgactgaaaaacacttcaccaagggcgaaatgagcgtggctttcctgttctttgaatgggcggcaatcccttctacgttattggccggttggttatcggataaattcttccgcggccgtagaatgccgttggcgatgatttgtatggtgatgatctttatctgcctgatcggttactggcagtgtgattccctactgatggtgactttctttgcggctatcgtcggttgtctgatttatgtgcctcagttcctggcttcagtgcagaccatggaaatcgtaccgagcttcgccgtagggtcagcggtgggcttacgcggctttatgagctatatccttggagccagtttgggtaccagcctgtttggcgtaatggtcgatagagtgggttggcacggcgggttctacttgctgatgggggggattatttgctgcattatcttctgctatctgtcccatcgcggcgtgctggaactggagcgggaacgcaaagatcagcaggtacgtttagataaagaagcattagcttaatcttagggttaaaacagccgttcagcgtcgaacggctgcgatatgaatcagttacggtaattaaagatgcccggcggcagaataagctgacgggcgacttcctcagctttttcccttcccaataataaaaagatgatttttaatgcaaagtcgatagaggttgccggcccttggctcgtaaccagattgactctacgatcgtagaccactcgctgatccatccatttattcggtgaaattttatctttcaagccgggataaccggtcatattcccgatggggaataggttatggtgttctaacaccaaagccggtgccgcgcaaatggctgcgaccagatggccttcattatgagtttgccgcactttttcgaccagcagcgggctatcacggaaacattctgccccttttattccgccgggtaataccactacgtcaaattgttgatcggccacatcgaccagacgcgtatctgccaccagttttacaccgcgagagcaagtaattactaactctccatcaccggctacgcttgcggtcgtcacttcaaagccgccacgtaccagcacatcaatggtggtgaccgcttcggtttcttcactcccaggtgccaggcaaaccagtgccgatacgctcatacacattttcctttcgtttaatcgaatcgtacaggcgtgaattttccggcagcgtcatgccgtgactgcgcgcccgacgtagtaaatagccggtgatatagtcgatctctgtatgtctctgcgcacgtaaatcctgaagcatggaggagacgttatcagccgtactttgaatcacttcctgcacataataaagcaggctttcggtggaggtatggaaaccttccatttccattacatcggcaatttctgcgcataatcgcgttaccagctcaggataacgctgtaggtcaccgtttcggcactcatacaggccggtaagaggattgataacgcagttgaccgccagcttatgccagcaggcggaggaaatatcattgtgccatgcgacgtccggcagggcgtggtgcagtatatccgccagataactgacatctttgccgggggcaatcgcggggccaatatgagatatgccgccggcaacgtggataatggtattgccgtcaggtcgcgctgcatgagtcgttacgccgtgcaggaaagtatttaccgcgtccggtaactcttcctgcgtacccattccgttatgcaagagcaaaaccgtgcaatccggattgagtttaggcagtagggtggttaccgcgctggaaacttgccaagctttcaaacataccagcagtaactcgctttctgctaaatgctgcggatcgttggtgggcagattttgattgaattcgtcaccttcaagggtgatgacattcaccgaacagtagggttgaggcactcgcaaccaaccctgaacatcatggccttgttggtacagagccgataaccaaagctgcccgagcgcaccgcaaccaagaaccgtaatcttcataactctctccctggtgtaaacggaaaacgcgctaaatatttataagtgttatgcttggattatagactttttcttcattaaacgctgagttagctacgttctgtggcgaaaatgcgaacagccagcggcttgattttgtctacgacgataaagcggttattatgcttgccattcatcttatatggaggagggaatatgccatctttcgacatcgtttctgaaattgatatgcaggaagtgcgtaacgcagtagaaaacgccacccgcgatctggcaaaccgttgggattttcgtaacgtcccagctagttttgaattaaatgagaaaaacgaaagtattaaagttgccagcgaatctgattttcaggtggagcagttgctcgatattctacgggcgcaactgagcaaacgtggcatcgaaggtgcggcgctggagattccggaagaaatggatcgcagcggcaaaacctacagcgtggatgccaagctgaagcagggcattgaaagcgcgcaggccaagaagctggttaagttgatcaaagacagcaagctgaaagtgcaggcgcagattcagggtgaacaggttcgcgtaaccggtaaagcgcgtgacgatctgcaaagcgtaatggcactggttcgcggtgcagatttggggcaaccgttccagttcaataacttccgcgactaagctcaaagtctgattgctgataacagtaataaaggctgctgattgataaagaggaacaaatgcccatttacagcttttgttcctcatctcatcatcgatgcttcttacacagcgttaaccagttgttctaactgatatcggttcgttttcttgatatctactttcacataagcgctgcgttctgccgctacgactatcgcttcggtcacgcctggctgcgctttaattttatgttccaaggccgaatctttagccgctaattcggacagcgtgatgcgtaagctactgacataaggaggttcctgcatcgttgcgctaacggcaaaccacaccaaagcaatgaccgaaccggcgataaacaccactcccgcaccgtcgagcccgaataaccaaccgcccaaactgccgccaatggctacgccgataaactggctggtagagtaaattcccatcgccgtacctttgtagccagcgggagactccttgctaatcaacgaaggcaaaattgcctccatcacattgaaggcaataaagaagagttgcacaccagcgataatgccccacaggtgttcaccggatgcccacatcactacttcggcgatcagcaatacggccacacagcccataaacacctgtttcatccggcgtttgacttcggcataaataataaatggtactaccgccgcgaaggaaaccagcattgtcaccagataaaccttccaatgctgttcgggcagtaagcccgctttggccatggcctgaggcagggcgacaaagctcgacatcaacagaatatgcaggcacataatgccgaaattaagttttagcaaccggctgtttttcaatactttattgacgctgccttttactatgctggattcgcgatttaatacatgggtatccgcagaaggcaccactgccaacgtgataacgatgcccagtaacgccagtaccgctatgccccaaaatagtgcattcaggccataggcgtgggtgacgattgggccgagtaccatagcaatagcgaaagtaataccgaagctaacgccaataaatgccatggctttagtacgattttgttcgcgagtcagatccgaaagcaaagccatcactgcggcggcaatagcaccagaaccttgtaatgccctgccgaggataatgccccaaatagaatcgctcatggcagcaatcacgctacccagcgcaaaaatcagtaacccgccaacgatcagaggtttacgcccaatacggtcggatattaatccgaaaggaatctggaatattgcctgagccagaccgtagataccgatagcaataccgatcagtgcttcactggctccggccaaagccatgccataggtggtgatcaccggcagcaccatgaacatcccgagcatgcgcagtgaaaaaaccgttcccagcccccaggttgcccggagctctaacggagtcattttgttatcgttcattaccacctcaaaaaaacttattgcactattgtaatgattttagtgccaaccggtaaatctattgatgtttagaatatattacagccagagtgggtatcttccggaaaaatagagtttatcagacggttgataggtgtattcaaaacgagaggaatatacagtctgatggcaaaatcaggtatgaataaaacagggtagggtagaaaagaggaagcgaccggctggaaaccagcgaggccgcttcatggaactttcggtgtgcttacccgacgtaagtcagtaatgcagcagatgacggaacgttgaagtctacagacatcattacactcaatgaagtaatcgcaatgattgagaatacgaagagttttctcgcccatacgctgtcattcgttgctttgtagccacgcagagccattcccaaccaccagacgctgactgccgctgcgactaccagatatttatatccggcgtagccgctgagagtcagcatcagtgttgctaccataaatgccagaatatacagggtgatatggtttttggtgaccgatatcccttttataactggcaataccggaatattcgccgcttggtaatctttaaagcggaatatggcgatcgcgtaggaatgcggcatctgccagatgctgaagatcaataacaggatcaatgcgccggtatcaaactggcctgtcaccgcgcagtagccgataaccggcggagccgcaccggacaagctgcctatcaaagtgccgtataccgacttacgcttcatgtagaggctgtaaaccccgacatagataatgaaacctatgacggccagtgccattgctaacacattggccgccacataaagcaacagcatgcccgcaatacccagtaccgatgcataaatcagggttatcttcggttcgataaggccttttaccaaggcccggttcttcgttctctccatgatgcagtcgatatcacggtcgatatagttgttaaatacacacccggaggcaacaactaacgaaacaccgattagcgtggcgagaaaaagggggtaatcaatatcgcctttagaggcgaggaggaatcccccaacgacagaaattaaattgccgaaaataattcctggtttagttacttgcaggtattgcttaatcatcacatgcagctctttagtcaaccatcatattgatgttgaggttgtacataatccacagcgagcccacaacaacgatcgcgataatcattacggtgaacaggaacgccaccaggttccagcgctcttctgacttaccattcatatgcaggaagtacaccaggtgtacgataatctgcaccacggcaagggtcacaaccgttgccagaatcatggtatgagaagcggtgccctgcataaccatgacaaacggaatgactgtcagaattactgacagaacgaagccgattatataggacttcaggctgccgtggcttgctccaccgtgaccagtagttgaatgactcatttacatggctcctaacagataaacaacggtgaatacgcagatccacaccacgtccaggaagtgccagaacagactcaggcacatcaggcgcgtttgattggtagggttcaggccgcgtttcgctacctgaatcatcataatgataatccaaaccaaaccagttgttacgtgaataccgtgagtggcaaccaacgcaaagaagctagacaggaacgcactgcgatccgggccgtagccttcagcgatcaggtgatggaattcatagatttccatcgccacgaagcccaggccgaacaggaaggtcatacccaaccagagatttacctgatttttgttgcctttgttcatacccagcatggccatgccataggtaatactactaaacaggagcaggaaggtttcgaccaaaacgaagttcaggtcaaaaatgtccttacctgtagggccgccagcggtcccgtttaccaatactgcataggttgcgaacaaagtcgcaaacagaatacagtcgctcatcaggtagacccagaagccaaagaccttggtggctcccgcatcgtggtgcccatgctctgcatgggctacgttgtggttagtcagagtttcagttgacatgattcacgcctgcttttctgatttgttcatggtgaagattttcaatgcgctcaacttcttctgccggcacatagtaatccacatcttcgtcgaagcttttcacgatccaggtgacgatcatgccaacgaagccggcgatagccatccaccagatgtgccagaccatggcgaagccaaagatcagactgaaagctgcaatgatgacacccgcgccggtattcttcggcatgtggatctcttcatatttagccggacgcttgtaagcttcgcctttctctttcatgtcccagaattcatcacggtcaacaacttcaggcactacggcgaagttatagaacggaggtggggaagaggtagaccattccagcgtacgtgcatcccacgggtcaccggtcagatcgcggttttgttcacggtcacgcacactgacgaagacctgaataacctgacacagaataccgcaggcaatcagtactgcaccgcctgctgccaccatcaacatcgggtggaattcagggttaatatcctggcttaaacgacgggtcatacccataaagcccagaacgtacagcggcataaaggctacgaagaaaccgataatccagaaccagaacgcacgtttgccccaggtttcattcagcgtgaagccgaaagatttagggaaccagtaagtcagacctgcgaagcaaccgaatactacgccgccgatgatcacgttatggaagtgagcaatcaggaacagactgttatgcagtacgaagttcgcacccggtacggctaacagaacgccggtcatcccaccgatggagaaggtgatgataaagccaacggtccacagcatcgcagagttgaactggatacggccttgatacatggtgaacagccagttgaagattttcaccccggtcgggatggaaataatcatggtagcaataccgaagaaggcgtttacgttggcacctgaacccatggtaaagaaatggtgcagccaaacgataaacgacagaacggtaatggcaatggttgcccatactaatgaggtataaccgaacagacgtttcttcgagaaggtcgccgtgacttcggagaacacaccgaataccggcagaaccaggatatacacttccggatggccccaagcccaaatcaggttaatgtacatcatcatgttgccgcccatatcattggtaaagaaatgggtgcccatgtaacgatcaagagtcagtaacgcaacggttacggtcaaaatcgggaaagaaacgataatcaagatgttggtacagaaagccgcccaggtgaagacaggcatcttcatcatggacatgccaggagcacgcatcttaagaatagtcgcgaagaagttaacaccggtcaacaaggtacccagacctgaaatctgtagactccatatccagtaatcgacgccaacgcccggattgtactcaatgcctgacagcggcggatacgccaaccagccagtctgagcaaattcaccgactcccagagagatgttgatcaacaccaccccgacgacgaagaaccagaaacttagggagttcaggaacgggaaggcaacgtcgcgagcaccaatttgcaatggtacgacgatgttcatcagacccaccacgaaaggcatcgccatgaagaagatcatgattacgccgtgggcggtaaatatctggtcatagtgatgaggtggcaggaatcctgcctcgccagccgaagcaagcgcttgctggcttcgcatcatgatggcatcggcaaagccacgcaacagcatgaccatcgctaccagaatgtacatgataccgattttcttatggtcaacggaggtcaaccattcgctccacaaccatttccatttgccgaaataagtcagggcggcaactaatgccagaccgcctagaataattgcagcaacggtaaccattatgattggttcgtgtaacggaaccgcatcaagtgttaattttcccaacatcgtttattcctcggctccggcgtgagagtggtcgcccatttccatgcctttgctcatgtccatgcctttatgcatgtcatcgctcttgtgcatgttcatatcgcccataaatttgccaatcgtttctttaaacagctccggcttaacgctggagaaatactcaaccgggttattttcgctcggctcagccaatttatcgaaatcagcagtggtattcagggtgtttggcgattttttcacctgcgcgacccactgatcgaaatcaccctgagtcggcgtagcgatcgcagtgaatttcataccagagaagcctttaccgctgaaactactggaaataccgttgtatttaccggcttcattggcaatcagatgcagtttggtttgcatcccggccatcgcgtaaatttgtccgcctaactgaggaataaagaacgaattcatcactgagttggatgtgatcttaaagttcacgggaacatcagtagggaaggcgatttcattgacggtggcaataccttgttctggatagataaacagccacttccagtccaaagaaaccacttcaatagtgatcggttctttaccttcgacaaccaaaggtttgaacggatcaagttcgtgagaagttttccaggttatcgttgccagaatagcaatgataatgattggtacagcccatacaacaagctcaattttgttggagtgggaccagttcggggtataggttgcatttttgttggaagcacggaacttccacgcaaaggcaaacgccataaaaataaccggaactactacgatcaacattaaaccgatagcggtgagtatcagcgttttttgttcgagtccgattgtgcctttagggttcatcaataccatatcgcaaccagcgagtgttaccgtggctgcaaataaagacaacatcccaatatttttaatgtatttcttaagtctcatctaacgacctcaattacaaagggctctattgtcgtttcaggtgtgcgggcattttacgggaaggttgcaggactgtaaacacgcttaaggttgtgtcagcggcttgttgacactttatgttaagggggtcacagatgttgctctctttgataattttctaattgcaacaatatgttggcgcaagagttaattaacaagcgtaactaaaagctaactatattaaggaaaaacaatgccaagcaggattttattgtcgggaaatacagatttgggaggagtttatttacgattttatgtaaataatatgtatcttaaaagtgaattaaaatatattccggggtaaccaaaatggtttccccggaatcatttagttagaaattatatttaattgagtaaacgataccgtcttgtaaaaagtcttcgcccagcttgttataagcataacgatactgaataccagtggtgaattgtttcattggtgtccaccacagtgcaatagcaccgttcaccccgttacgaccgccgttacctgccgcatagcgttctgcacggttaaattccagctcgttccagttagtaatgctgaatttctcatcgaaagcggtgaaatcgtagccagcaacccaaccaacaacataaccgttattacctgagtaataagtttggtcaacgtagtgcagcgcaacgaaaggcttcatccatacgccagcaatggtggtgttatagccgataccgtacagggtattcacttcgtggaagttgctgtagttgttgccttcagcagctggcagagagtaggtgccataaacgtggccgtataggttaaaaccggtgtcgcctaaatagtagcggccagtggttttaaaggtgtaacgctggttatcgcccggctgagcagttttggagttgaacgggttttctaaatcgaagaagccgtaaacttcaccccagctaaaacctgcgccgccctctaattcaatataggcaaagtcatctttatgagatgaaccaccggatttatgcgtagtgctcttcgtccaatccaggtagttcatgctgatattgccgaaaccccattggtattcagcttgcgcagaaggagccagagtgaccgcagttagcgcgatggcgccaacgagaattttacgcataaaagcctcaattattgttaaaaggtgtcaggggaaataaaaggacatatgtccttaataaaaagtgcgcacatcatagtctgacagcacaaaaggttaaagacctgagggtgatttgaatctcattttaagaataatatttctgattagttgcttaataatgtgatcatgattgtggttttgtcgggtgtatacccagttgactaacttttacgtataaaaaagccggtaatagaataccggctattggtgaagcaacgtgtcgtcttaagtcaagcgggcgcgacgcagtgccagataatccagcgctccacccagtatcattccaacaatactgagttgaatccctcgtaatagcagcacatcggccacttctggcgctgcggtccatccccaggcattgctgattaatagcaccagccacgcggccaataataaacaaccgatggttaaaaagcgtaaggcccagcgataaccatttttaaattcggttcgaggcatgaattcatcggttttttgcgtgaattcaagggtatggcggcagatatagagtaatatcaggcccggaacggcggcggcgatggagaacagataaaatatcgaccagccgttagtttctacaaaccagcctgcaaccgggccgacatacacgcgaccaaccgcagacagtgctgacaataaggcaaactgagtggcggaaaacgacttattgcacagcgtcatcaaaagcgccacaaaggctgcggtacccatgccgccacagatgttctccagaaaaatggcgctccccatggtgaagatattcttgtctgtcaccgatagaatccaatagcccagattggaaaccgcctgcaagatgccgaaaatcatcagggcgcggaataagctgaggcgttgcataagcaaaccgccatacaaagcaccgataatcgtcgctaacagacctagggttttattgaccaggccgacgtcaccggcgttgaaacctagcccacgaatcagaaacggcgtactcaggctagcggcgaaagcatcgcccattttataaagcacgatcagcagtaaaatcagccaagcgttattacggccaaagaaatcgcgcagcggggcaacaattgcctgttccagcgttttaggtgcggcggcgggggcatccggttcaggagccatcagagtagcaaccaccccgataaccatcaaaccagccattaaccaataggttgactgccagccgagataacggtccgcaatccatagcgccaaaccgccggaaaccaacatggccagccgataacccaaaaccgaaactgcggcgccggttccccgttcttctgcactaagcaaatcggttttataggcatcaaaaacaatgtcttgagacgccgagcagaaggcgaccaataccgcaatcgctgccagccaccataaatgcttcgccggctccataaagcccattacgatgatagccactattaataatagctggctcaccagtaaccaaccgcggcgacgaccaaggaaagaaggggtgtagcggtccatcaatggggaccacaagaacttgaagacgtaagcctgaccgaccagagagaaaataccgatggttttcagatcaacttgctccaccgtcatccaggcttgcagcgtgccggacgtcagagccaaaggaagaccggaggcaaaccccagtaataaaagaatgagcgaattacgctgtgtaaacaggtttgaatagcgactggacataagaaacctacgtgctctgccccgattcagggcagagcaaagttaagcaaacaacagattaacgtgcgttttgtttgataaagctgttaacgctggtgtcttgagccatatccgcaataacgtcactgagcacggtattcactgcttcagttattttggcattggttgcggtaaatgcgccctggacattataggtagaacggtagttcttaacctgtttgttaccattttgcgcctgagctgtgatggagatatcagccttggtcgtgatgttgtagcgcagattaccttcctgcacgttggcgaacagttggttaactacgatttgcagatcaaccgggccgccggtaccaatcatatagccacgggcagtcatttgtttttccagcacttcctgcaacaggaagcgcaggtcgcgagatggcgttaataccaccaatttgccatcgcggttgactttggccagcgcggaatcctgacgctgatcggcaccgttgatactgatggtaattcccatcaaggtgggatcttgcggtggcaatacgattttcggcgtgacttcaagcgtattgctgttggtggcgcaacccgccagcatcaacgcggccagcagcgggaaaagaattttctttagcatgttcactttctcgagagttatggaatttttaataaactgagcgggatagctgcaatattattgcgacatcatagcactgccgcagatagggggaagatcccaatggtgacaaattcgccacaaatacggattttcatactggaaccctacaaataaccttttgccgtgacaatcggattatcctcaacctctggccgtttcgtcggcgttaggcgtatttaaccgagaattattgtcaaaggaatgttataaaacagccaaaaccgactaatattgctgtaagaaggtgtgcagttctctgccggtgcagtaaggagatctttatgattctgattcgcgaaaagatagaagaaaaactcagggcggcatttgaacctgttcacctggaagtgataaacgaaagctacagacacaatgtgcccgcaggctcggagagccactttaaggttgtgattgttagcgataaatttgccggtgagcgctttttaaaccgccatcgtgccatttatggcgtattgtccgaagaattagccggtgaagtccacgcgctggcattacatacctacacggtcaaagaatgggagagtctgcaagacaccttgcctgactctccatcatgccgcggtgccggaaccttggcataaatatggtatttgcctgatttccgtggaacttttctgctgatttaaggtattagtaatagagaaatccacaggcggcctttgggccgtttgttttttaactggcgacaacactatttttagcacagcgctgccagcgtttttgtcgagggatcgacgtccgcgtaaattttcgcgcgctgacattcactcgctttcctcgactcgaaacctatgcaccgctataatgtcgcgtcttatttttccggaatggtttcgggacgcttctgacatctgggatactcggttctgtaatgcggccgtcccggttcttagagggtgttttcagggccagtgtcattcctacaatggcagggttttgatagcggcttctggagttgaccgagcactgtgatttttttgaggtaacaagatgcaagtttctgttgaaaccacccaaggccttggccgccgtgtaactatcactgttgctgctgatagcattgagaaagcagtaaaaagcgagctgttgaaagcggctaaaaatgttcgcattgacggtttccgtaaaggccacgtgccgatgaacatcgttgaacagcgttacggcgcgtccgttcgtcaggatgtactgggcgatctgatgcaacgcaactttgttgacgcgatcatcaaagaaaaaatcaacccggctggcgcaccaagctacgcaccgggcgaatacaaagaaggcgaagatttcactttctctgttgaattcgaagtttatccagaagttgaactgaaagatctggaaaaaatcgaagtagagaaaccggttgttgaagttaatgacgccgacgttgatgcgatgctggacaccctgcgtaagcaacaagctacctggaaagacaccgatggcgctgctacagcagaagatcgcgtgactctggacttcaccggttctatcgacggcgaagagtttgaaggcggcaaagcaactgatttcgtactggctatgggccagaaccgcatgatcccaggctttgaagacggcgttgtgggccataaagcgggcgaagaattcactatcgacgtgaacttcccagaagattaccacgctgaaaacctgaaaggtaaatcagccaagttcgctatcgttctgaagaaagttgaagaacgtgaactgccagaactgactgaagaattcatcaaacgtttcggcgtggctgatggttctatcgaaggtctgcgcgctgaagtacgtaaaaacatggaacgcgagctgaaaggcgcagtgcgtaaccgtgttaaaactcaggcaatcgacggtttagttagcgctaacgaaatcgacgttccagttgctttgatcgacagcgaaatcgacgttctgcgtcgccaggctgcacagcgtttcggtggcaacgagaaacaagctgctgaactgccacgtgaactgttcgaagaacaagctaaacgtcgcgttgttgttggcctactgttgggcgaagtgatcagccagcacgagctgaaagctgacgaagaccgcgttaaagcgctgatcgaagaaatggcttctgcctacgaagatccgcaagaagttatcgagttctacagcaaaaacaaagagctgatgaacaacatgcgtaacgttgctctggaagaacaagcggtagaaacactgctggctaaagccaaggtaaccgaaaaaccaactaccttcagcgagctgatgaatcagaccactgcagcgtaatgttttttagcgcataacgttaagtatctttgacttggcgttttgacttctcaagcccgtcgcctttggctacgggcttttttcttcttgatttacacgataaaaacaacaaattctcggctatggttcccgtcaaactgggctatattaaaaaaataaaagaaagtgctgaattaaatccgtagcgagcgtctaaaaaacgcgtgaggtgagaaaggggcgttgagacaataaaaggtatggggcttgaaaaacagtatccttcccccaattactattacagactttatgttctatctttccttgcgttggctgattatcaccgctggatatgtctgggacgacctactgcttatcatggtcatcattgcttatctcaagtagaatcggttattaatggcgccaaagtaaattctattaggagatggtaatgtcatacagtggcgaacgagatcaatttgcacctaacatggctctggtgccgatggtgattgagcagacttcacgtggggaacgttcttacgatatcttctcccgtctgctgaaagagcgcattatcttcctaaccggccaggttgaagatcacatggccaacctgattacggcacaaatgctgtttttggaagccgaaaacccggaaaaagatatcttcctttatattaactcaccgggcggggtgatcactgcgggtatgtctatctatgacaccatgcagttcatcaaaccggatgtcagcaccatttgtatgggccaggcatgttccatgggcgcattcttgctgaccgctggtgcgaaagggaagcgtttctgtctgccaaactcgcgggtgatgattcaccagccgctgggcggattccaggggcaagcgaccgacatcgagattcatgcgaaagaaatcctgaaagtgaaatcccgtatgaacgaactgatggcgaaacatacggggaaacctctcgaagaaatagagagagacacggagcgtgaccgtttcctgtctgcggccgaggctgtagaatatggattggtcgatgagatattcaaccgccgtgactaacagcgtatttctgtgcgccgatagactataattggaaaagtttagtcttttagcacgctaaggtgccggcagtccgtttgataaagacgtgacgtccagaagtaacgagaatagtctccctgccgtcctgttgttagtgacggcagatactaaagaagaggtttactgatgacagataagcgcaaagacggttcaggaaagctgctgtattgctctttctgcggcaaaagccagcatgaagtgcgtaagctgattgccgggccgtcagtgtatatctgcgatgaatgtgtcgatttgtgcaacgacattattcgcgaagagattaaagaggtcgccccgcatcgggagcgtagctcattgccaacaccgcatgaaatccgtcgccatctggatgattatgtcatcgggcaggaaccagcgaaaaaagtgttggcggttgcggtttataaccattacaagcgtctgcgtaacggtgataccagcaacggcattgagctgggcaaaagtaacattttgctaatcggtccaacgggtagcggtaaaacactgttggcggaaacgctggctcgtttcctggatgtgccattcaccatggccgatgcgacgacgctaaccgaagccggttacgtgggtgaagacgtcgaaaacatcatccagaaactgttgcagaaatgcgattacgatgtgcagaaagcgcagcgcggtattgtctatatcgatgaaattgataagatttctcgtaaatcggacaacccgtcaattacccgtgacgtatcaggtgaaggcgtacagcaagccttgctgaaactgatcgaaggtactattgctgccgtaccgccacagggtggacgcaaacatccgcagcaggagttcctgcaggttgatacctcgaagattctgtttatctgtggcggcgcatttgctggtctggataaagttatcgggcagcgtctgaataccggtaccggtattggttttggcgcaacggtaaaaggaaaatccgagaaagcaaccgaaggcgaattgctaagacaggctgagccagaagatttgatcaagttcgggttaattcctgaattcattggtcgtttgcccgttgttgctaccttgagtgaattgagcgaagacgccctgattcagattctgaaagagccgaaaaacgccctgaccaagcagtatcaggcgttgttcaatctggaaggcgttgagctggaattccgcgatgaagctctgacggcgattgctaaaaaggcaatggcgcgtaaaaccggtgctcgtggcctgcgttctatcgtagaagcggctttactggacaccatgtacgatctgccatctttggaaagtgtggataaagtggttgttgatgaatcagttatcgccggtcaatctgcaccgctgctgatttacggccagcctgaagcgcaagcttctggcgaataattagccaaataatccagacagttagtaagataatgggggattttatcccccatttctttttcctcgcattgttatcgttgaatgtaagacattcgtccccatatactcaataacctatttagtgaaactcgtgacctcccgtgtttcacgagatttcctgaaatctggcggaagctaaacataagagagagctctatgaaccctgagcgttccgaacgcatagaaatccctgtattgcctctgcgcgatgtagtggtttacccgcatatggtgatcccactgtttgttggccgggagaagtcgattcggtgcctggaagctgcaatggaacatgataaaaaaatcatgttggttgcacagaaagaagcgtcgacggatgagcctggtatcaacgatctgttttctgttggcaccgttgcctctattttgcaaatgctgaaattgcctgatggcacagtcaaagtactggtcgaagggttacagcgtgtgcgcattaccactctgtctgacagcggagagcatttcgctgcccaggccgaatacctggaatcacctgcaatcgatgagcgtgagcaggaagtactggtgcgcacggcaattaatcagtttgaaggctatatcaaactgaataaaaaaatcccaccggaagtcctgacctccctgcatagcattgaagacgctgcacgtctggcggataccattgctgcacatatgccattgaaattgaatgataaacaagcagtgttggaaatgttcgacattaccgaacgtcttgaatatctgatggcaatgatggagtcggaaatcgatctgttacaggttgagaagcgtatccgtaaccgcgttaaaaagcagatggaaaagagccagcgtgagtactatctgaatgagcaaatgaaagctattcagaaagaactgggtgaaatggacgatgcgccggatgaacacgaagcgctgaaacgcaaaatcgaagcggcgaaaatgccgaaagacgcgcgtgaaaaaaccgaagctgagctgcaaaaactgaaaatgatgtcgccgatgtctgcggaagctaccgtagtgcgcggttatatcgattggatgttgcaggttccgtggaacagccgtagcaaagttaaaaaagacttggtcaaggcgcaggaagtgttggataccgaccattatggtttggagcgcgtgaaagaccgcatccttgagtatcttgcggttcagagccgagtcagcaaaatcaaaggcccaatcctttgcctggtagggcctccgggcgtgggtaaaacctctctggggcaatctattgccaaagcgaccgggcgtcagtacgtccgtatggcgttgggcggcgtgcgtgacgaagcggaaattcgtggccaccgtcgtacctatatcggttctatgccaggtaaattgatccagaaaatggcgaaggtgggtgtgaaaaacccactcttcctgttggatgagatcgataaaatggcgtccgatatgcgcggcgatccggcgtcagcgttgctggaggtgctggatccagagcaaaacgtggcgtttaacgaccactatctggaagtggactacgatttgtccgatgtgatgtttgtggcgacctccaactccatgaatatcccagcaccgttgctggatcgtatggaagtgattcgtctgtctggttataccgaagatgaaaaactcaacattgctaaacagcacctgctaccaaaacagttcgagcgtaatgccattaagaaaggcgagctgactattgatgacagcgcgattattagcattatccgttattacacccgcgaagctggggtacgtagtctggaacgtgaaatttccaaactgtgccgcaaagcagtaaaaaatctgctaatggataaaacggttaaacacatcgaaatcaacggggataacctgaaggatttcttgggtgttcagaaggttgactatggtcgcgccgatactgaaaaccgcgttggtcaggtaacgggtctggcatggaccgaagtgggtggcgatctgctgactattgaaaccgcctgtgttccgggtaaaggcaaattgacctataccggctctctgggtgaagtcatgcaggaatccattcaggctgcgctgacagtcgttcgtgctcgtgcggataaattggggattaaccctgatttctacgaaaaacgtgatattcacgttcacgtacctgaaggcgctacgccgaaagatggcccaagtgcaggtatcgcaatgtgtactgcgttggtctcctgcctgacgggtaaccctgtgcgcgccgacgtcgccatgacgggtgaaattacgctgcgtggtttggtattgcctatcggtggattgaaagaaaaactgctggcagctcatcgtggtggtatcaaagtggtactgatcccagatgagaacaaacgtgatttggaagagattccagacaacgttatcgccgatctggagattcatccggttaagcgcattgatgatgttttagccattgcgttgcaaaatccggcctttggcgcacagcctgttgcgtcaaaatagtgacggatagcaagaagtattgataaaactaatgctggtaagcgaaatcctacttgccagctattttttgtgccgctaagttagatcggctgtctgacgaaagcattcgcctttaggttgcttgccaaggctagacaggattgatataacagctgcgctgtcgtgttgtccgtagggattttcggcgcgacgatagaattctaaaggggatgaaagagtgaataagtcacaactgatcgacaaaattgccgcaggtgctgatatttctaaagcggccgctgggcgcgcgttagatgcaattattgcttctgttactgaatccttgaaagaaggggatgatgtagctctggttggtttcggtacttttgcagtacgtgagcgctctgcccgtactggccgtaaccctcagaccggtaaagaaatcagtattccagctgcaaaagtaccaggcttccgtgctggtaaaggcctgaaagacgcagttaactgatgactacctcagatctcttcggtgccaaatattgtttgtgataaacaataacctgacgcagttgagttggtaaggtaagatataaggcgcatcgtaactgatgcgcttttttttcgcttggcagttgaactggcgtaaaatgctgacttagccgtaaggcaatggcggcgttggccactgtgagaagttttatcgcgcagcaacgattttgggctgacgcaaggaacgctgggtcttcatacctgagcaagagtttttatccacattacagcggagtattgtcacattatgatggacaatttacgcgcggctgcaaataacgtcgtgctcaaaatcatcctggccctgattatgttgtcctttatcctgaccggcgtgggcggctatctgatcggtggctccaacgactatgcagctaaggttaatggccaagagataagccgtgcccagcttgaacaggcaatgcaaagtgaacgtagtcgtttacagcaacagctaggcgagcagttctccgtgctggctggtaatgaaggttatatgcagcagctgcgtcagcaggtgttggggcaactggtcaacaacatgttgctcgaccaatatgctaaacaactcggcctgactgccagtgtcgatcaggtaaaagaatctattcgccagattccttatttccagactaacggtcagttcgataacagcaaatatctcgagctagtaaaccgtatgggctacagcctcgatcagttcgcgcaggtacaacgtcagcagttgattaatcagcaattgctacaggcctttaacgacagcggttttgcactgccggcagaagctaccgctatgtccgagctgattttgcaacagcgtgaagtgcgactggcaaccttggatctgaaagcgttacaggctcagcagaaagtcactgatgaagagctgaaagcctattacgatcagaacaaaaacagctttatcgcgcctgaagagatgaaagtgagtttcatcgccatggatgcggcagcgatgcaagatacaatcaccgtgactgaagaagatattgctgcttattacgatcagcacaaatccagttttactcagccggagcgcagaaattacagcgttattcaatttaaaaccgaggcagatgccaaggctgctttggatgaactgaaaaaaggtgctgatttcgctacgttggcgaaagaaaaatccaccgacattatttctcgtaaaaatggcggtgaactgggttggttagaacctgagacaaccgccgatgagctgaaagaagcgaatctgaccgaaaaaggccagctgtctggcgtggtgaagtcttctgtgggttatttgatcgttcgcttgaacgacgtcaagccagagcaggttaagccgctgtctgaagtgcatgattcgctggcagccaaagttaagcaggaaaaagcggttgatgcttattatgcgttgcagcagaaagtgagcgaggcggcaaccagtgataatgagtctctggcttcagctgaagaagctgctggtgccaaagcgaagcaaaccggttggtttactcgtgattctgtacctgccgaagtgaatttcaaacccgtagttcaggctatctttgatggcgctttggttggtgagaatggtgctcctggcagtaactctgatgtcattaccgttgatggcgatcgcgcattcgtgattcgtatcgatggtcataaaccagaaggcgtacagccatttgatcaggtacgcgatcaggttgctgaactggttaaacgccagaaagcagagcagcaggctcgcgttgacggtgaaaaaattctggctgcgctgaagcaagataaaggcgaagaagcgatgaaagccgctggtctgagctttggcgagaagaagtccatcgctcgtgcgccggatgacgatcagttagttcaaaccgtatttgcgctgcctcatccgcaggcggacaaaccggtttacggtttatctcaggatcgtcaggacaatattgtattgatcgaattgctttccgtgacgccgggtaaattaccagagggtgaaatggcaaacttcattgctaaaatggaagagggtatcggcggggtgactctggatgcgctgatggctaacttgcacaaacaggcaacgattaaaatgggtgctgcggaacaacaacagccgcagtaaacatcgcaaacctctgcaaaccgatgtaacaatgaaaggccgctttagcggcctttcgcatatctggaatccgtgatttgccgaaaaaaaacgcttgaggcaaggtacagatgctgtcaaatacatggaggatacagcatgaaaaataatggaaaatccttagcactggcattgctactggcctggttatcagctccggtaacgctagcggctcctaatcaaacgaaagaatccgtgcaaaccaactcatcaaaagcatcggctcaaacctcagagaagtcgtggaataggtcgaaagaaaataacttgaaagctgacggagcaaacaccaataagccttcagccgggaaaaatgagacagaagacggactgataaatgttaataaagccacggcagaagagctggctgctgcgctgagcggtattggtttgaaaaaagcccaggccattgttcgctatcgagaggaatttggcttctttagtcaaatagagcaactgcaagaggtttcaggtattgggccgatatttattgagcgcaatcggcagaaaataaaaatgtaagttgaatgatatttaatcatttagttagtggtttataacattggctgctaacctttcatcaggtcataccagttctgtggcgtatgtatttgaaaaattcataaatgatgaaaggggcgttgattagcatgcatcatgaagttttggttagaagctatcatgttgatggttatttacatgtcaataattcacgttatttggagttctttgaggaggggcgctggcgttggcttgatcgagagaatcggctggaatggttgaaagaacggaatattggtttctatatggtaaatatcaatattaattatcgtaaaggggccgttgagggagatctgctacgaattgagagtctggtgtattccctggaagggcgctgcgggaaattcaagcaggtcatgaaaaggttatcggacggcgcggttatcgcagacgctgatatgacgtttgtctgcatagatatgggaatacaaaaagcgctgcctatggaaggggagttaaaacacaaattggaattattaggtaactaacttattggtatattttttactatagctgagctaatggggtgcgttcagttcagctattttattctgcaatagtggagttggtgtaaggctgttcgcagagagcgaaaatgtaaataattggttaactaactgtgatctaaatctaagttatatagtgagtctgctatgtgcttgggtggctctgctattatcgatgaggtcataccagtttggtttacagttctggcagatgcttacctgcattcgattttatcccgtagctgaggttttctatgcgcacccatataacagttcgtggttttcatattgacgtttatcagcatgttaataatgcccgttatcttgagtttcttgagcaagcgcgctgggaatggctggatggggaggaagcatttcagtggatgacccgcaaccatatcgcttttatcgtggtgaacgtcaatattagttaccgtaaacccgcggtgttaggtgatgtgctacgcatagatagccatttggtaaaactcagtggtaaaagcggggtgcttaatcagattgtgaccttagagtccgatggttcgctggtggctgatgccgcactgacttttgtttgtattgatctgagaacacaaaaagctgtgccaatagacggcgagcttcgggaaagattgagtgcgttagaagagccgacgcaagggcagtagtcgtcctgatgagcaatggtgctttaattagcttactttgaaaatcgttgcggctatttgggttcagtttgttcgaataatattttgcattgctctatagctctatagctctatagctctatagcaagcagcctgtgaatttatgtatcacagactgcataggcctgtttaggttgaaccgattagggctgaaccaaactggggaaactgaaattaaagtagaccgattttctttttaaggctggtcgtgacagcagacttattagttaggtaattattcagcccattagcccgtaagtggcaggctgcacattcgccgcagccatcgcctttaatgccgttatagcaggtcagcgtgtggtggcgaataaggtctagctgttggtaataatcggctaatgcccaggtctcagctttgtctagccacattagcggagtgatgaaagcgatatcccgcgcgatgccgagattaatggcatggttgagggctttaacaaattcatcgcggcaatctgggtagccagagaaatccgtttcgcatacaccggtaatgaccgcttctgcttgtacctgataagcgtagattgccgccagagtcagaaacaggatattgcggccgggaacgaaggtgctgggaatggcattttcgctgctttcttcataagtcggcacgggaatactgtcgcgagttaggctactgaccgccagctcgtttagcatgcagacatccagcactttgtgcgctttggcgcctaattgaatgacaagttcgcgggctacgtcgatctcttcacgatggcgctgaccataatcaaaggtcacacagtgaacttcatcatattgctgcaatgcctgaatcagacaggtggtggagtcctgcccaccgctaaatactacgactgcgcgtttcattaatcgctccctcgtaggcttaaggtcgatataacaataaccttgagccggaaattaaatactgtggctatgttaactcagttagctggctaaaaggtaataacaggccgaattgaatcagtgaagccattgataattactgtatctgcaataagcgctatccaaggatagttcgctttaattatccaatatggcgttatccagcgatgactctggggtagggggcaaccaggcctgacaaaaatcaaaccaaccgtaggcggtgagcgtaacgcctttgattctcggtggcgcactaacctgatattgataatttaatagcggcagaaccaacccggtggacatcagctgtagatagtgttcccgcaataatgcataacgttcacttggtgctttaacctgttgaatttgcagtaatgactgctgttgccaaagcagtaagtctgccggaagaataccctgccataaaaaatcatggcgtaaccaactttccatggtggcttcgcgggattctccaacaagatggtctgacattaagaggtctgcttgttcacattggttaacgctttgccagtgtttgttggcgcaaaattgaacttcaagctcgcagccgtgttcggcgagtaattttttcaactcgctggcaaccatggtcaactctgctggttgctggtagagcaaaattagccgtttaggtagcgtgatgcttttatcttctgggaaccgagggataggccagccgggcaacatttcttcgctgggaatgataattcccctttgaatggataaatttgccaaaaaaccggatgcctgaatcagcatcatcatttttctggcttgctgggaattgagctggcctcgtttcaggttcatggctaaatagcaaaaacctaggctggtactgcgttgaacaggttttgccaagggcatatcttcgctttgcccaatggtgatgctgaccggatgctggctgctgccgttaaccacaacatccggaggctgtggggagatccagtattcgatactgtcgagatagggatgctgcaaatgataaaactcatgttgttcgagccttatcaagtgtttttcaaagtcggctactttaaacggcccggcgcctaccgatggagagtcagggtgaaacaaacgatagggcaaatcggccatacggtgagccaaccagtaatcgggatattcaagggtaaactggacgcataacgcatgcggcagagttatagatttaacattttccagccccggctgaccgcgaggatggtgacgcagtatatggaaggtttccagtaactgtgctccgctaatgggatcgccattatgccagcgaagctggctgcgtaagaaaaattgccaggttaggccatcatcactaatgtgccagtgatgggccagatcgggctttggcagaggatcaccggtctgaaagcgggtcagacccgcatgtagcgtatatatcaaatgctgttccgcgcgcccgttggtttctagcggaattagcggttccagctctcgataataaggaattcgtagcaccgggctatccgcttgccattgcccgcccatatgtgggctaagtaatgcatgcagacgctggggttccaactgggctaattgaaatgcaccctgatgatccccttgttgtaataactggcgtagataggttgctcgcaattcatccggtgttttcaggcagtgaattcgtgctcgtttgcctctgccaacttgcgcatcccaactgagccagccctgttcctcaaatttttggataagggttctggtatgccgatcgctacaaaaaaacagcttggctaattcactaaccgtcgtgttaccagcctgctggccaaattcttgatataaacgctgatattgagccaatcggtgaaatatgcgcatagttaaatccggaagggtttgtattaattgttcactattagttccctaaatactacgccatacttttgtcactgccagcaggctcacaattttatgaggtaagtatgtaccgcttagccgctttcgatatggatggaactttattaatgcgtaaccatcagatcggtgaggcgactttggaagcgctgcatcaattgcaccagcgacagataatggtcacttttgctaccggacgtcattacctcgatatgaaagggattttatccagtttaggaattaaaggttatctgattaccggtaatggaacccgtattcatgatattgacggcaataaattgcagggtacagatttacccgcggaattagtgcagttcgttctgggaacaacctggtctaccaacgccagcatgcatatttttcgcgatgaaggctggtttaccaatcgtgacgatccggcgcagttaacggcgcataaactgagcgggtttaaataccaactcactgaatttaatcagttacctttggcaggaacacataaaatctgtttctgcgcgcctcacgaagagctgttaccgctgaaagacaggttagctgcgcggatggggcaagaggtggatttgtgtttttctgccagggactgtctggaagttttacctcgtcactgtaataaaggtgctgctctggcttcgttgacagaactattgggtgttgaaatggtcgattgcatggcatttggcgatgcaatgaatgataaagaaatgcttgatcaggttgggcgcggaatggtaatgggtaacgcattgcctcagcttaaatcagcattgccgcagcttcaggttattggccattgtgaacaacaggccgtagctcactatttgcaacattggctaagttcaccacacctcacctattcccccgaattctgaggtgattgctattagccagccggatatttatccggcttttttttttgcttattatcgaccaactttaaataaattggccgatgaactggatgattaaaggttttccaactccgccttaaaactggttaaatccccaatgttagcgctcacccattcagggttgtaataagtatccagatagcgttctccgctgtcgcagagcagagtgacaatagctcctgactcgcctttttcacgcatttgtcgggctaactgtaaagcaccccatacgttagtgccggtggaggcgcccactttacgacccaaaacgccttctaaccaatgtgccgtagcaacgctggccgcgtcgggaacgcgtagcatgctatcgatcacctcaggaataaaagagggttcggcgcgcgggcggccaatcccttcgatgcggctgccgcaggtgccggttacgctgcgatcccgattgcagaagcaatcgtaaaagaccgaattttccggatcgactaccatcaattgagtattatgcccctgataacgaatataacggcccagcgtcgccgaagtgccaccggtaccagcgctcatcacaatgtaattgggaacggtaaagggttcgcgggccatctggcgatagatactatcggcaatattattatttccgcgccaatcggtagctcgctcagcgtaggtgaattggtccatataatggccgtttaattcttttgccaactgctcggacgcggcataaatttgccccgcatgatcgacaaagtggcagcgaccaccgtaaaaggcaatttgttcgacttttttgcgcgcggtgcagcttggcataactgcaataaacggcaacccaatcaggcgggcaaagtaagcttcagaaaccgcagtgctgccggaagaggcctcaataatagttgtcccttcctttatccagccgttacacaggccgtaaagaaacagagagcgcgccagccggtgtttcagacttccggttggatgggtgctttcgtctttcagatacaggtaaatgccaggaaactcaggcaaatttaagcgaattaagtgtgtatcagctgagcgttgaaaatccgcctctatttcactgatggcgttttttacccaagtattggtcatgtagtggcctgcgatgtcgggggtatcaaattatgactaggttaacggtattttgggaaaaaattgttgccatttttacttctttatctcctaatgagagaaatttattctctggagtggcgatatgttagataaaacagaccgaaaactactgcgtatgttgcaggaggattgcacgctctctcttcaggttttggcagaggcagtcaatctgacgtcaacgccttgctggaaaaggctaaagcgtctggaggatgaaggttatatccgtggccgggtggcgctcttggatagcgaaaaactggggctgggattaacggctttcgtactgataaaaacccaacagcataatagcggctggtatcaggagtttgtgcaattcactaagcagatgccggaggtactggctttctaccgtatggccggagaatatgactatctgatgcaggtcgaagttgcggatatgaaaagctacgatagtttctataagcgtatggtgaatggtgttccggggttgatagatgtaacttccagcttcgcaatggagaaaattaagtacacaacggtactaccggttcctgagtgaataattcactaaataacaactttatcgatgttattctatgccgcatgagccgtggcgagagagtctgacattattcgattcgcctccatactatttcccttcatatcatggaataaaactgcgtgagattgtttgctcaactaggctggtactttcgtcgcgaatggcgtcgctatttgggtgcggtagtactgctgatcattatcgccattttacagctgttgccacccaaactggttggggtcatcgtggatggtatgacggaaaaaaccatgtccgccaatatgttgtggacatggattggcgtaatggtagtgaccgcgataatagtgtatctgctacgctacgtctggcgcgtattactcttcggcgcatcctatcaattagcggtggaattacgctctaatttctaccgtcagcttagccggcagaatcctggtttttacttgcgtcaccgcacaggcgatctgatggctcgcgccaccaatgatgtcgatcgagtggttttcgccgccggtgaaggggtattgacgctggtggactcattggtgatgggctgtgcggtgctgattgtgatgagcacacaaatcagctggcagctgacgctgctgtcgttgttaccgatgccgataatggcgattgtaatcaattatttcggtgatttattgcaccaacgttttaaatctgcgcaaggggctttctcggcgttaaataatcaggcgcaagagagcctgaccagcattcgcatgattaaggcatttggccttgaaaatcatcagtctgagcagttttcccgtgtagcaaccgaggccggtgcgaaaaatatgcacgtagccaaggttgatgcctgttttgatcctacgatttatatcgctatcggcgtagccaatttactggccatcggtggcggtagctggatggttgtgaatggcagcattacgttagggcaattaaccagttttattatgtatttagggttgatgatttggccaatgctggcgctggcgtggatgtttaatatcgttgagcgtggcagtgccgcttacggccgtatccgtagtttgttggaagaggctccggttgttgtcgatggacaaacgccattacaggcggaacgcagtactttgacgattgatattcgccgctttgattatcccggaagtgataagcccgctttacaagacgtcaagctgaagctggagccaggagagatgctggggctatgcggcccaaccggttcggggaaaagtaccttgctggccttgattcaacgacagtttgatatagacgaaggtgacatttgctatcaggggcaacctctgacggctattcgtttggacgattggcgtagccgcctgtcggtggtcagccaaacgccatttttattctcggataccgttgcaggcaatattgcattgggtaagcctgacgccacgcagcaggaaattgaacaagcggctcgtttagccagcgttcacgaagatattctgcggttaccacagggatacgaaaccgaagtgggagagcggggcgtgatgctttccggtggacaaaagcagcgtatttctattgctcgcgccctgttgcttaatagcgaaatattgattctggacgatgctctgtcggcggttgatgggcagacggagcatcaaatcctgaagaacctgcgtcagtggggagcacatcgcaccgttattattagcgctcatcgtctctctgcattgactgaggcaaatgaaattctggtcatgcaacaggggggcgtggtgcagcgtggcgatcatgagcagttactgaatcagtcgggatggtatcgggaaatgtatcgttatcagcaaattgaagcagctttagatagcgatgaagggctggaggtcgtatccgatgagtaaagctcgacaactttggccgacgttaaaacgtctgctggcttatggttcagcctacaaaagacccttgtctatcgcgatagtcatgctgtggattgcggcagcggcggaggtaagtggcccactgctgatcagctatttcatcgataatatggtcgcaaaaggcaatttgcccttggctgtagtgagtggcttggcgctggcctatttgctgctgcaactcttggcggcggcgctgcattattttcagacgattctgtttaaccgggctgccgtgggtgtggtgcaacagttgcgtattgaagtcatggatgccgcactacgccagccgcttagcgcatttgatactcagccggtcggtcaattaatttctcgcgttactaacgataccgaagtcattaaagatttatatgtgatggtggtttctaccgtgctgaaaagtgcggcgttaattggcgcgatgctggtggcgatgtttagcctcgattggcgtatggcgtggattgccatctgtatttttccggcggttttggtggtcatggcgctttatcaacgctacagcacgccggtggtacggcgagtacgcgcctatctggcagatattaacgatggttttaacgaagttatcaacggcatgggggtcattcagcaattccgccagcaggttcgttttggcgagcgaatgtctgccgttaatcgggcgcactatagggcgcgaatgcaaactctgcgtctagaaggcttcctgctacggccattactcagcttgttttcggcattggtactttgcgggctgttgttactgtttgggttgagcccagaaggctcggtgggtgtgggggtactgtacgcgtttattaactaccttggtcgcctgaatgaacctttaatcgagctaacttctcagcaatcaatcatgcagcaggcggtggtggctggggaacgtatattcgaactgatggatcgcgctcagcaaggttacggtcaggataataatccactgaccagcggtcatatccggatgcgggacgtttccttctcttatcgttcggataaaacagtgctaaaccacatcaatctggatgtgccgtcgcgaggctttgtcgcattggtcgggcataccggcagtgggaaaagtacgctagccaacttgctgatgggctattacccggtacagcagggagagattctgctggatgggcgcccgcttgacacactctctcatcaagtgctgcgacagggtgtctccatggtgcagcaagatccggtggtgttggctgattctttctttgccaatattacactggggcgtgatatcagtgaggaacaggtttggcagacgctggaaaccgttcaactggcacctttggtccgcgccttgccggaaggattacacactcgtttgggggagcagggcaatacgctgtcggttggacaaaaacagctactggctatggctcgtgtattggtacaaacgccgcaaattctgattctggacgaggcaacggccaatattgactccggcacggaacaggctattcagaaagctttgcacttaatccgaaaaaataccacgctggtggtgattgctcatcgtttgtcgaccattgtggatgccgacagtattttagttctgcatcgtggacaagcggtggagcaaggcaagcatcaggaactccttgcgcaacagggccgctattatcaaatgtatcaattgcagttagttagcgaagaactggagaccgtcgaaccggaagaagccgctattagctagctcagattgtcagggggagctttccccctgaaattcaattcatgcccgcttattttcttccccgcactaaaatctggcgtcttgcgccgccttgttcgtggaaatgcacttttgtgacgcgtgtggcactattttggtgcacaaaaaacgtactgctcgctgctgcggtgagattcacacctatactgaagtcgataatccatcctcaagcctctttttatcaataaattcttcgctagtttatttatggcacatcctttgctttatccctgatgcggcagacgttattcggacttaattcgagaaggggcaaatatgaagctggttaccgtggtaataaaaccattcaaacttgaggatgtgcgcgaagccttatcctccataggtattcaggggctgaccgtaaccgaagtgaaaggatttggtcgccagaaaggacatgctgaactttatcgtggggctgaatatagcgttaatttcctgcccaaagtcaaaatagacattgctattgccgatgatcaattggatgaagtcattgatgtcatcagcaaagcggcctacaccggcaagatcggtgatggcaaaattttcgttgccgaattgcaacgggttattcgcattcgtaccggtgaaacagacgaagcagcgctctgattctaggctcaaatttagtgattagggatgggttgataatgaaaaaacgtttatccgtgtggggcctgagcgcagcagccatgttgccttcgatggctatggccgccgcgcctgcggtcgctgataaagccgataacgcctttatgatgatctgcactgcgttggtgttgttcatgactatcccaggcatcgctttgttttacggtggcttgattcgttcgaaaaacgtgctgtcgctaatgacacaggtgatggtcactttcgctctggtctgcgtactgtggattatctacggctacagtctggctttcggcacaggtaacgcattcttcggtggtttcgaaatggcaatgctgaaaggcattggcttgaccaacctgagcggcactttctatcaattgattcacgttgcgtttcaggcttcattcgcctgtattaccgtggcgttgattgtcggtgcctttgctgaacgtatccgcttctctgcggtgctcattttcactctgatctggctgactttctcttatttacctatggcgcatatggtgtggggcggcggttttctggcacaggatggcgcgctggactttgccggtggcaccgtggtgcatattaacgccgcggtagccggtttggtcggtgcctatatgctgggtaaacgagcaggctttgggaaagaagcctttaaacctcacaacttgcctatggtctttaccggtaccgctattctgtatatcggctggtttggctttaacgcaggttctgccagttcagcgaatgaaattgccgcattggcctttattaataccgtggtggccacagctggcgctattttatcctgggtatttgccgagtggattttacgtgggaaaccatcgttgctcggcgcttgttccggctgtatcgcgggtctggttgctattacgccggctgcgggcaccgtgggcgttggtggcgcgctgattattggtttagtcggtggcgttgctgggttgtggggcgttgtattactgaagaaatggctacgtgttgatgatacttgtgatgtatttggcgtacacggcgtctgcggtatcgtaggttgcatacttaccggcgtgtttaccgcatcttcactgggaggcaccggttatgcggctggtgtcaccatggggcatcaggtcggcgtacagctcttcagtattggcgtgtgtgttgtctggtctggcgttgttgcctttatcgctttcaaaattgccgatgttatcgttggcctgagagtgccagaagagcaggaacgcgaaggtttggatgttaacagccacggtgaaaatgcttataaccagtaagaatttgagttcgaaataagtaatatttagtgaaggggcgatattgatttcgcccctttgttgattaaagagattagaaagaagtaaaaccgaatgaatcagcggcacaagtacccatcagccgcgtaaacgaataaccccttcttgcaccgtagaggcgacgagcacaccctggcgattgtaaatctgaccacgaacaaagccacgagcgccggatgctgaagtactttctaccgtatacaacagccattcatccaggcggaatgggcggtggaaccacatagaatgatcgatggtagcaatctgtactcccggctcgagaaaaccgatgccatgaggctgaagagccgtcggcaagaaattaaaatcagacgcgtagcccagcaaatattggtggatatccaaatcgtccggcatctggccgttagcgcggaaccatacgtgacgcagcggttcttctttatgacctttcaacgggttatggaatttaaccggtcgcatttcaatcggctggtggccaataaacttatcccgcagtttttctggaatcaggtgcgccagatttttggcgatttccgcttccgataccaaaccttccggcggtggcacatccggcatgtcattctgatgctcaaatccctcttcaggcgtttggaatgacgcggtcataaagaagatcggtttgccattttgaatagcgctgacgcggcgtgcgctaaagctggtgccatctcgcaggttttccacatcgtaaacgataggtttgctgctgtcgccggggcgaagaaaatagctatggaaagagtgaatgtaacgatcggctggtgcggtctgtttcgcagcataaattgcctggccgacaacctgtccgccaaatacctgacgcagccctaagtcttcactttggccacgataaagaccttcttcgatcttttccagattaatcaagttgaggagcttttgcagtgcctgacccatggtgtggccctctgtgttttctttcagcatagtgtgctgaattattaggtagctcgtcaatgtattgctattaattcactatacaaactattgtttgtagagaaactaattgctaactgaatgattaggctggatgtcagaaacgccaggtagcgttttatgctataattacctgtctaggtggttgaagccacttattaagcgccggattttcgatgagtcaccggcattgggataataagaaggagacgaccctatgaaactatggcagatagttggcggcgcagcattaacggtaaccttggcgggttgcgcgaatcacggcgcagaagttcctacccagacggcagcaagcgccgcagcgacctcggccgctatcgcgcagccatcagtcagaggtaccgtaaatattcgcgaacgtgtggcattgccacctgacgcagtcattacggtaaccttgtctgatgtttctttggccgatgctccttccaaagtgattgctcagcgtgcagtgcaaaccgacggcaagcaggcaccttttactttcgtgctgccgtttaatcctgcggaaattacgcctaacgctcggattatccttagcgcggcgataactcagaatggccagttattatttatcactgataccattcaggaagtgattaaccgtggtcaggggacaaatgcggatctggtattagtaccggtaacctccgcgccaattcagactacaccttaatcacctttgagaatgacataaaagcaggatggaatagatgccaaggcgtattttcccatactgcttttatctttctgttttaattttccgctattaccaacgccaggcaaatcgtttaaggtcgatatatccttgaacttcaaaagtgacaccttccgctagtaaggctttttgctgacgcaaataatcttcgccgcttagtgagatttcaccgtggcgattgacgacacgatgccagggtaggctagtgccttccggcaggcgtttcagtactccaccgacctgtctggctgcccgtggcgagccgcacagacgcgcgatggtgccataggtggtcacctgaccataaggaatggcggataccacatgaaatacgcgctgacggaaactatcttcttcctgttccatactctgcggagctctttttaaatgaatgcgagtgcctggaattattatcatgcaatatccccggagctgcgagaaacatatttctgacggccactagccatttgttgggcaagaaaccaccagttgatgcgggttgtcttgctatttagcggggtatggtcaataatgcccaccgcttcggagtatcaggagctgtcaatggaggctctgttggttctcccgcaacactaacttgtgaactcggtcaggtccggaaggaagcagccgcagcaggcgaggtgtgtgccgggatgtagctggcagggcctccaccaattctggcctagcctaaatctctcctgtttctcatatatcgccatttacacccaacgacttatacctgactactcctacctcactacccagatgatttaatcgctttctttaggctgttgcagcgatttcaccaacgtttgctctctccccgtagttatccttttagcctgtatcgtttaaccgagacaaaggcacaatatgctcaatacattttgtatttagatatctctctttgtcatccccatagtttatcaatggcaagaatggatatttttaaaaaactacggggaaaaagcgttggggtgtttcttataagaattgaatttttagccactaaccataatacctaaaccttgaagctaaccattattgttttggataaaaggctatttttaactggatttgacaaaattagattaaaatattggcgtaaaggggtgttgtaccgggttacgtaaataaccgtacagacagaaaagagtttttacatagtttatgataaccgttaaatcattaccccattgaagccgatagggttatcggctcaacgttgttcgtcttaaccagcgctaagcgatttaccttacatacttccaaacacccataggaatcttatcatacagtttattcatagttagctcagccaggcgatgatctgcggcggagtagaataattccagttcgtcatcagatagttcatacgtatttttttcaataacacgttctaaagtgtcaattgttgtgcattttcttaaacgcatcagatagtcagttttggtcataatggaaattcttctcaatatatgaataaaatatgaataaagaaattatagggcactatcccttaatttttcatcagggtacagacgtattcccctgagaatagtctgaataatcggtcttttgttttctgccagcgacgcaattccgggtcattaattccgtaactactaaacagtgtataagtgtcgtctagatattcctccactaactcggagaggtccgcttcttccgcgtattttattttaaaactcatcacaaatgaagctatatgctcgatcaaatcatttaactgtaaatttatcgcagaagtcggatcgtttacccagccgtggtgactatcgcctaatgtggcaataccttcatcatacaaattctcacataagaatttcaactgagcaatatcatgtcgcttaggtgagtactcatccatatcatcccctccgttaacgcttaatcggtgcgataacacatagtgagtagactgataatcattatacgaacaggtaaacagccagaaagtaaataagtctgtcgtatacaaatataaatcattttttcagtcactgctctatctttattacttaatcttacaattcatcagcggtagagggtttgtcgtaatctattatatcaaagattattttttcaggatgtacaataaatgttacagcgttagtaatgtaatcttgggtgttgatatcaagacaggcgttaaaaatataccattgataacggtaagtcattgaataatcgttaagctgaatgtttttaatctcaagaatttctaatgagcctgcagcgtagcgtgcatcttcggaataatacattagcccagacgtcaggttttcttcaatcgtgctgatattatcttttattacctcactcagttgtgaaacagagctgaggcagcgggagaagtctcctcggatttccttgttcattaattgttcgcttatgggctaattaatttatttaatgtatcaaaactcaagggcagggagtgaacctgctgatacagcctgttgtccatgagatttaagtggtttttgaataattcgaataagtaatattattaatcaaataaacagcttagcaatgtagtgtaatacgtcagaagagacttaatattgtttaatcttgacgagtgagagtcatggcttcctaatatttcccgattattgcactgtgagtagaagaaaaatttaagactaaattcatctgttgagcggttaatgtgaagggaagcccatgatggagggacgcagccttacacatgggcaactaaagatcattcgatattgctatcattacccttccgaatacgaaacagtatagctggctaacccggtgtcatttggtaaagataatttaatttactgttacgaattattttaaattaaattagatgccatttacagtttaaaccataattttttgcctgctattgccataggcctcccactctagactcttctccctgattctcctttctccgcgttatctcactctttgttacctaaattatgcatcaatatcatcttgagtattgaatctgacaacttgatgtgatgttatattgtatcaataatgactcactgatatcttcctatgtgccaatcccatcaccataaagcgtcgctttctgtaccgaatcgaacgctattttcaatttcttcatggctgcgcgcgttcggcatgataaccgtgctgatcttattgtggtcagccatttattgggcgaatgcactgccatgatcactttgcaacagctacaggttggttatgggcagcagccggtcaccgctcctcttaccggctcttttgcccgcggctcgctcaccgcagtgattggcgcaaatggtgccggcaaatccaccttacttaagacattggccggattacagccagcgttaggcggcaaaatagtctttggcgacaagaagattcccagaatggcttatttaccgcagcaagccgaattggatcgccaattccctattatcgtgttcgatgtagtagcaatgggatgctggccacaaagtgggatgtttggtggcctgaatcgacaatcggtacaacgcatcaagcaggctttggacaccgtcggcatgctggatatggccagatgtccggttggggtgttatccggcgggcagttgcagcgggtacttttcgcccggttgttggtacagcaggctcctttattactgctcgatgagccttttaccggcattgataatcagactctctgcttgctattaaacgttatccagcagctccatcaggaagggcgaaccattattgccgttttgcatgatatgtcgatggtagcgcagcattttccacgagtattacagctcaccgctgaatattgtcgctgggatgaatctaaacgcttgtttgccgagtgcgctgaagcaggccgaaacctttccaatcaaaataatctgtctgtggaagcccagccatgaatttgtttcatctattagccgacccttttgtcgatttcggttttatgcgacgagcgttggtggcttgtctggctttgtctttgagcgccgcgccgcttggcgtttttctattgctacgacgaatgagtctggtgggggatgcgctttcccacgcggtattacccggtgcggctattggctacctgatttctggcgtatcgctggttgcgatgggcatcggtggatttatcgctggactggcggtggccatgctatcagggctagtcagccgtaaaacaccgttaaaagaggacgccagtttcgccggtttttatttgggttctctagcacttggcgtcactttggtttcattacgcggctccagcatggatttattgcatgtgttattcggttcgattctggctattgattccgccgcgatgaccatggtgggcgctatcgcgaccctttcgctgttagtactggcgttgatttatcgagccctggtgattgaatcattcgaccctgtctttctgcgcgtcagtatggggcgttggctgatggtggtgcatggcatttttcttgctttggtcgtggtcaatctggtcgccggtttccagattttaggcaccttgatgtcggtagggttgatgatgttacctgcggccagtgcgcgtttttgggccaaggatttacctcatactttagctttttcggtgctgatcggcatgatttccagcgttgtaggcttgatttggtcttactacgcttcactgcccgccgggccggctattgtgcttagcgccagtattattttctttatttcgattttgtttggctcgcgcggcggcatttgggccgtggcgcgggattagaagtgtgtgctttaaaggagaattaaatgaagcgtttacctatcgcgttggcggtcgctgccctgctgtccagcccgctggctatggccaaaactatcgaagccgtcgccagtttttctattctaggagatattgtgcagcaaatcggtggtgagcatgtgaaagtcaccacgctagtggggccggacggcgatccgcacagtttttccccctcgcctaaagatagcaaacagatttctcaggctgacgtggtatttgtcagcgggctgggtctggaaggttggttgaatcgtcttattgcggcctctggctataaagggccggtggtgacgctttcagagggtattcattcacggaaaatggaggaggaggggaaaaaagtgaccgaccctcacgcctggaacagtatgcaaaatggtattcaatatgccacgcatgtgatgaatgctttaatcgttgccgatcctgaggacgcggattattaccgtaaacatggtgcagaatatatccagaaattggaaaaactggatgcctatgctaaagcccagtttgccagtattcccgttgaaaaacgcaaagtactgaccagccatgatgcttttggttattttggacaggaatatggcgtcacctttttggcacccgttggtttttccactgaagccgaggccagcgccagcgacgtggccaatttgattaagcaaatcaaacaggaaaaggtaaaaacctattttattgagaatcaaaccgatccgcgtttagtgaagcagattgctgcagccagcggggcggaggccggaggcgaattgtttcctgaagcgctatctcagaaaactggcccggcagctacctatgcggaagcgttcaaacataatgtcgatactatcgtcgccagtatgaaataactattttcccctgtctgcaacgggcaggggggcgacaacacttctaaaagcacggcatagtgagttttacggtaaagaaaaagccccgttgggcagcaacgaggctttttatctacaggcaacaagcaaaatacaagttggtaaatcggacttaacgtttctttttagttcctccctgaaccgctttgaagcgcggattgcttttacaaataacaaagactcgtccgtggcgacggacaatcttgcagtctggatgacggttttttgctgaacgtaatgaactaagcacttgcatgatgcattcccagatcagttattttttttgaaaaaatggccaaaacgctgctggaagcgcgcggtgctaccttctttggagaattctttttgtttccctgtgtaataaggatgggaagcggaagagatatccaaagtgacgtaaggataggtttggccttcgaattcgatcgtgcgttcggtggctatggtcgaacctacggtgaagtaaacgttggcgctggtgtcgtgaaagactacggtgcgataggtagggtgaataccggctctcataataaccttctatgtaatgttataatataacaataattatgcgccgagaaataagcggtttcaagccaaaaatgcaaacaatggaaaaatgatgatggatgaggcgatcgtcagacctgtgcttaagaaggggatcgatgaaaatttagtgaaatgccaggcaagaaaaaggccgcttgcgcggccttttacagagtgttatcgcaggttaagcattacttaacctgatgatcaaccgaatgactatgttcaatatcctcattcttcttgctgaaacggcggcgaaccaccacgaagaacactggaacaaagaagatcgccagtacggttgcggttaccatcccgcccattacgccagtacctaccgcgttctgagcgcctgaacctgcaccactgctgataaccagcggcattaccccgaggataaaggccagtgaggtcatcagaatcggacgcagacgcatacgaaccgcttccaacgtagattcgatcagccctttaccttctttctccattaagtccttggcgaactcaacgatcaagatggcgtttttggccgacaagcctatggttgtcaacaggcccacctggaagtaaacgtcgttgtttaatccacgcagagaagcggcgagtaacgccccgactacgcccagcggaaccaccagcataacggagaacggaattgaccagctctcgtatagtgcggccagacacaggaataccacaatcagtgagatggcatacagcgccggagcctggttaccagacagacgttcctgataggacataccggtccagtcatagccgataccgcttggcaatttagacgccagttgctccatcagatccatcgcttcaccggtacttttacccggtgcagcctgacccaaaatttccattgatggcaaaccgttataacgttccagacgcggtgaaccatactcccacttcgcagtagagaaggtggcaaacgacaccatttcacccgcgttgttgcggacataccacttatcgatatcgctcggtaacatacggaacggcgcatctgcctgtacgtaaactttcttcacacgaccgcggtcgataaagtcgttcacgtagctcccccccatggcggaaccgagtgtggtattgatgtcggaaatagccacgccgagggcctgtgctttttcctgatcaacttccactttgaactgaggtgtatcttctaaaccatttggacgcatgcctaccagcatgtctgaatgctgagccgccatacctaacagctggttacgtgccgcagtcagtttttcatgccccaggttaccctggtcaatcagttggaagtcaaagccggtcgcagtacctaactcgacaatcgccggtaggttaaaggcgaataccaaaccgtctttgatttgcgagaaggcgtgagatgcgcggccaacgatagccggtaccttattctcctcgccctgacgttcgtcccagtttttcaggctgacgaacgccaaaccggtattttgcccctgtccgctgaaaccgaagccgttaacggtaaagaccgagttaactacgtctttttctttgtccagatagtaatccgtcacgtggtctagcactttctgggtacgctcttgcgtagcacctgccggtagctgaaccatggtcaggaatacgccctgatcttcttccggtaggaatgatgttggcaggcgcaggaacaacacgcccataccgataacaatcgccagatagatcaccagataacggccggtactgcgcaggatattagctacgctgtcggtgtaatggtgggtgctcttttcgaacatccggttaaaccaaccgaagaaaccggttttcgggccgtgtgaacctttaggaataggtttcaacatagtggcgcacagtgccggtgtcagaatcaacgccaccagaaccgacagcaccatggcagaaacgatggtaatagagaactgacggtaaatcgcaccggtagaaccaccgaagaaggccatcgggatgaataccgcagaaagcaccatcgcgatccccaccaatgcgccctggatctgctccatggatttcttggtggcttctttcggcggtagcccttcctcttgcatcacacgttcgacgttctctactacaacgatggcgtcatccaccaatagccctatcgccaacaccatcccgaacatcgttagcgtgtttatcgaatagccaaaggcggaaagaatggcgaacgtccccaacagcaccacaggtacggcgatggttgggatcagggtagcccggaagttctgtaggaacagatacataaccaggaataccagaatgatcgcttcgaccagcgttttcaccacttcgttgatggaaatcttaacgaatggcgtggtgtcgtacgggtaaactacttttagaccggctgggaagaacggttgcagcttggccagttcggcttttactgccgccgaagtgttcagggcgttagccccggtagccagtttgataccgatacctgccgcaggtttaccgttgaaacgagcgataacgctgtagctttccgctcccaatttgacgattgcgacgtctttcaggcgaacctgagagccgtcggtgttcactttcagcaagatctggctgaattcttccgcagaggtcaaacgggtttgcgcaataatagacgagttaagctgctggcccggcactggcggtgtaccaccaagctggcctgctgccacctgattattctgcactttaatcgcattgataacgtcaaccggcgtcagcttgtagttgttcagcttgtgtggatccatccaaatacgcatcgcatattgggaaccgaacagctgaacgtcacccacgccggaggtacggctgataggatctttaatgttcgaacctacgtagtcggcgatatcttcctgctgcatggtgccatcttcggaaataaagccggcaaccattaagaagctgctgctggatttctcgacgctaacgccttgctgttgtacttcttgcggtaacagcggcatggccagttgcagtttgttctgcacctgaacctgcgcgatatccggatcggtaccttcgttaaaggtcagagtgatctgtacgctaccggacgagtcgctgctggaagacatatacagcaagccatcgatgccgttcatgttctgttcgataacctgagttaccgtattctgaactgtggtcgcatcggcgcctggatagttggcagagatcgaaattgccggtggcgcaatggtcggatattgcgctacgggcagtttcattatcgcaagtgcgcccgccaacataatgataatggcgataacccatgcgaatatggggcgatctataaagtacttagccatgaattaccggctccttttaagacttcttcgcttgttcagccggtgctgctgccggtgcggcgtcagagacttcctgcgccttcacctgcacgcccggtttgattttctgtaagccggttacaatcacgcgatcgcccggtttcaagccgtcggtaatcagccatttatcgccgattgcctgagccgcagttaccgtgcgcagttctactttgtcaccttcgcccacgaccatcgcggtggcttcaccacgcgggttacgggtaataccctgctgaggaaccagcagcgcatctgctctcacaccttcatcaagacgggcgcggacgaacattcccggtaacaatgactcgttcgggttagggaagatggcacgaatcgtaatggaacctgtggtttcatccacggttacgccggagaattccagcgtcccggtttcagaatattcagtgccgttttccaataacaggcgcactttcgctttgccgttttcctgtttcatgacgccgctggccagttctttcttcaggcgcaggaattcatcactggactgcgtcacgtccacatacattggatcgagctgctgaacggtggttaatgcggtggcctgagcgctgctaaccagagcgccttcggttaccgaagatttaccggtacgacctgaaattggcgaagttaccttggtgtaagccagattaatacgtgcgctttccagcgcagcttttgcgctttgtactgccgcattggcctgcatcaggttagaggtcgcggtatcgtaatcttgtttactgatgtagttggtgcctaacagaggtttgtaacggttaacggtcaaacgcgcaatttccgcgctggcctgtgctttggctaaatcgcctttggcgctgtcataagcggcctgataggtcgccgggtcaatttgatatagcgatgttccggcggtaacgtcactgccttcaacataattacgtttaagaataatgccactaacttgaggacgaacctcagcaatacggaaagcagacgtccgccccggaagctcagtagtaatattgagaggttgagctttcaatgtcacgataccaacttcaggggcttgttgtgcctgggcgccttgcgctgcatctttatcattacatcctataagtactaagctgcctgaaagtaccagaattgcagccagaggcattacccctctgtttttgctcatagataaacctcaagtgtccgatttttaattaaccaatggatcacaagctctaaaacccattgctgcgaaaatgatatgtgcgtgctatggtacatacattcgcaaatgtatgtaaatcacagccccccgaaaaaacaacgccatggcacgaaaaaccaaacagcaggcccttgagacccggcaacaaattcttgatgccgccgtgagagaattttctgaacatggtgtttcaggaacctcactcgcggatattgctgacgctgcgggtgttacccgtggtgctatttattggcatttcaaaaacaaggtcgatctgtttaatgaagtctggtcgttatcggaatttgacatcgatgaactcgaactagagtatcaggcaaaatatcccgataatccactgcgtatcctacgagaaatcctgatttatattctggtcgctacgaaagaagactgccgacgtcgtgctttgatggaaattgtgttccacaaatgcgaatttgtcggggagatgacctcagtccatgacgcaagaaaagtcctctatctggcaagttatgagcgaattgaagccgttttgcaagactgtatcgcagcaaaacagctacctgccgatttgaatacccgctgtgcggcgatcattatgcgcgcctatattaccggcctgatggaaaattggttatttaccccagaatgttttgatatccaacaggatgcagcggtattaattgatacctatctggaaatgatttcacggtgccaaaccctgcgaggggaaggcgcttcagcgaaataagattaacgtgaggtaaatatgagttctttggtcgttattgccaacggtgctgcctatggtcatgagtcattatttaacgcactacgcttatccattgcgctaaaagatcagcagcccgatttagatcttcggttatttctgatgtccgatgcggtaactgccgctatgaccggacaaaagccacatgagggatacaacattcagcagatgctggagattctcagcgcccagttggttcctatcaaactgtgtaaaacctgtgctgatgcgcgcggaattagcgcgttgacgcttattgaaggcattgaaattgggactttggtcgaactggcgcagtggacgctggcggcagagaaagtgttaaccttctaattctcaggctgatagggcggttttcagccccgtaggccgttttttatgcaatgaagaatttttcttatgatcggcgttggccgaacgtggtaggatttctattatctccgctgatatgaagttagatcatgattcgctggttcaatacccaatcgtctctgcttttcaataataccgacagcaataccaacagcgcacccttgcttcgtgtctggatgctttttagtctgcttattctggcgctggtgtgtttgcctgcggctaacgcggcgaacttaaatggcgacgtgccgagccgtagtgaagtacaaaatcagctcgatgttctggcgaagctgaaaactccgacgccagccgacaaactggctcagcaagatttggtgcaaacgctggaatacctcgacgccattgagcgggttaagcaggaaaccaaccagcttaagcagcaattggctcaggcaccggctaaactgcgccaggcgaccgatgcgctggaagtgctgaaaagcaactcctccgattcgctgactcgtgaatcactagcgaactattctttacgtcaattggaatcccggctaaatgaaacgctggatgacctacaggcggctcaggaagatctttccacttacaatagccaattgatttccctacaaacccaacctgaacgtgtacaaagcgccatgtatagcgcttcccagcggctacagcaaatccgtaatttactcaatggattagcgccgggacaggatggtttacgtcctacgcaacagcaaatgctgttaactgaacaggtgttgttgaatgcgcagttggacttacaacgtagaaatctggaagccaacactacgttgcaggatttactgcaaaagcagcgggattataccaatgctcatattggccaactggaacgtaacatccaaacgcttcaagaggttgtcagtggtaagcggctgattctttccgaaaaaacggctaaagaagcccaggttccggatgattctaccgacattcaaaacgatccgctggtcagccgcgaactggcgattaatcgcgatttaagccagcgtttgatcaatgccaccaaagaaggcaatacgctggttcagcaaaatattcgtgtgaaaaactggctggatcgtgcattgcagtctgaacgcaatttaaaagaacaaattaccgtattgcgaggtagcctgctgttatctcgtattttgtatcaacaacagcttagcttaccgaccgatggcctgattagcgatatggggacgcgcattgctgacctgcgtttggaacagtttgaaattaatcaacagcgggatcagctcttccagggcgatgattatattcaaaaggtgatgagcgacagtaaagaaaaagtcagtggcgaagtggaagatgcgctggggcaaattgtcgatattcgccgtgagctgttggatcaattgaataaacagttgggtaaccaactgacattggcgattaatctgcaaataaatcagcagcaattactcagcgtcaacagctcactgcaacatactttaacgcaacaaatcttttgggtgagtagcaataaaccgatggattggtcgtggttgaaaagcttgcccgaggcgattcacagtgagttgagcaatcttcatttcaaattttcccctagcgatattctggcgggattactgaaatctttgatttttgtgattccggggttgctgctggtcggcgtgattcgctggcgctataaaatcatagataaccatctggatagtctggcgaacgatgttggtcagctaaaacacgatacgcagatgcatacgccgaaggcgattttgctcattttattaaaggtattgccgggtgtggtgctgattctgcttgtaggctattggtgccttcaatcggagatggcgattagtgatttcctctggagcttcttccagcaattggccttgttctggctgatattcgatttgacctaccgcatgttgtccccaggggggattaccgaacgtcacttcaatattgccgctgagcgctgcgcgcattaccgtcggcaaatggtacgtttgggcgtagcgctgctgccggtgattttctggtcggtattgggcgagaaaagtcctctacggctggtggatgatgttatcggtcaggtggtagtggtgattgcgttagcgctgctagcggtatttgttttcccattctgtcgtgatagctggcgtgagaaaaacagccacgcggtgcgattggtgatagtgactgccattgcggtgacgccggtgattctgattggcctgatggctgcgggttatttctatactacgctgcgtctggccgggcgttggattgacagtatctatctattcttcctgtggaatatcgtttatctgaccgcgattcgaggcttaggcgttgccgcccgccgtttggcttaccgacgcgccattgctcgtcgccagagtttggcgaaagaaggggcggaagggagtgagccggtagaggagccgccgctggcgttggatcaaattaaccagcagtcattacgtttgaccacgatggtgctgttcctgatttttgctacggcgttttactggatatggtcggatttagtcacggttatctcctatctggacagtatcactctgtggcattacaacagcacggttgccggtgccaatgtgcagcaggcggtgacgctgggtaatattctggtggggattatggcgctggtggtggcttatgtcatgacccgcaacctgccaggattgctggaagtgctggtattatctcgcttgcagctgcgtcagggcacgtcctacgccataaccactatgctcacttatctgattacctcggtcggggctattaccgccttaagttctctcggcgtttcgtgggataagctgcaatttctggtcgcggcgctaacggtgggtctgggatttggtttgcaggaaatcttcgctaactttgtgtccggtatcattatcttgttcgaacgtccggtgcgtatcggtgatacggtgactatcggcactttctccggtacggttagcaaaattcgtatccgcgccaccaccatcaccgattttgatcggaaagaagtgatcatcccaaacaaagcctttgttaccgagcgcttaatcaactggtcgctgtcggatacgattacccgtattctgattaaagttggcgtggcctatggctctgatttagataaagttaaagaagttcttctgaaagccgctcatgataatccgagagttatgtccgatccggaaccgcaggtgtttttcctcaatttcggtgccagtacactcgatcatgaattgcggttgtatgtacgtgaactgcgcgatcgtagttacaccgtggatgagttaaaccgcgcgattgataagctttgtcgcgaaaacgacatcaatattgcgttcaatcagcttgaggtttatctgcataaagaagatggggcagaagtgcaggaagtcagccgtcctattaatttgatgccggataacgagcggaaacaactgcagccttagtttgaaacgggttttggatcggaaaaactaattggaaaacccataaatgctgagggcgaagccggagaggtttcgccctttttggggcagcgttgtaagccgtagtcaggcagggaattattcctgacggtgatgactcagcttttgctgatagtcacgcttaacaatttccagcgctgccagcgccgtttctggcgcaatttcgttgcattccagcaggtaaatcaaatctaccgctagctgcaattctggtggggcgtgttcaactgacatatgagccaacattagggtttcagtttgagtgaagaaaatccaacgtgacaccaaaaacaatctggtgcagttatatccgtgccgtcaatgcgaatgccggcagaactgacaaatcgataagctgcattatcccgcataatccggtggcatagtgaggaagccggccagcctcagagacgtaaatatatgcgtaatgaatcaactttgaatgcatgctagctaatcagaatattattatagataataaatttaaaccaaataatcatcatttatgcaaatgtgacccgccttcaaaaaccattatcttttctctcgatactgcgctcgattcgcgtcaaagcctgacgacaacgcattaatcggccttccagcgccgccagttccttctggattcgctgctgatccaccagacgggtttgttgtcccaactgactttcacgatcttgaatcatagtgatgatccgtctttcataatcctgatgctctgccagtttatggtacggatcctggctaacctgtcgtggtttgggctgatttttacgtagggtttgagtcgcgagctctcgctgtaaagctgaaatctgcgccaccagcttttctgccaaaaaagccacctgttcggagcgctgttcggcgacgacttgcttcaattgtgtcagattcttgcgaacctccagcagataatcccgcaaacgcgtgccgtggttactgaaaagaagctgatcaaaacgagcctgagccgtaggcgtgtgcgcctgtggggcgatttcagccgacagtgcttcaacctggctttcaagcacctgtaacaatttttctgtgctcatggaattctctcctgatattcttggggctagcttgcctttgaacccgccgggaaacaaggaataaggactggtttgggtaaattgaatcatgaatcgactggtggtgaatctggttaatgataaagtaccggttagtatctttttcaatgatggtgagaataaataaagggagcttatgtctcgttggttgttaatcatcctgggatggaccgccgtggtcttggctaccttaggcgtggtattaccgttgttacccaccacaccatttttgctattagccgcttggtgtttcgctcgctcatcgccgcgttttcatcagtggctactctatcgttcatggtttggcagctatattcgcaactggcagcaacatcgggcgctgccaccgggagccaagtggaaagcggtactggtgacgcttatcactttttccatatccctgtggctggttaaaatctggtgggtaagaatgctgttagcaattatgcttatcgttttattgattttcatgctgcggatgccggttattgacctaacgcaacaaaaaaagcgctgattatctggctccggttgcatttttccatcagtttgaatagatttgagcgttttcgtgcgcggattgccccatagtccctgtttagggcgttaaaaggggtggatgtgttctgtcccggcggtgtttgatcgacatcgggtggccgcgttttagtatgttcagcagttttatcaggcacaaattatgaccgctaccgcacctaatacagcacaacagcttcagtatattaaagacagtattgaaaccatccctgactatccaaaaccgggcatactgttccgcgatgttaccagcctgttggataatcctttggcttacgcttccagtatcgaactgctggtagaacgctatctggacgctggcgtgaccaaagttgtaggtaccgaagcccgtggcttcctgttcggcgcgccggttgcattggctctgggcgtaggttttgttccagtccgtaagcccggcaagctgccgcgcgaaaccattagcgaaagctatgaactggaatacggcaccgataagctggaaattcacaccgatagcattaaaccaggtgataaagttctggttatcgacgatctgttagcgaccggcggaaccattgaagcgacggctaaattgattcaccgtttgaaaggtgaagtggttgctgcggcatttattatcaatcttccagagctgggcggtgaaaaacgcctgacggaacaaggtattgattgctacagtctggtctctttcgacggtcattaatttgaccatgccttttggcaatcggtaaaaaaaggcctcgttactgaaatagcacgaggcccagttaattctctattgctgtctgaatgatcacagtctgactgcactttcagctaaccatattttctgttaacaatattctcggttaacaatactcgctgcgaataacactgcatctgacgattacacattagcatttgccggtgatttctgtcgacgtttacgccaacgccttaatataaaaggcaatatcaatactgccacagccagaccgagtaaggtttgggcgattgcaccctgccataagatactgaaatctccgttactgatggaaagcgcgcgccgtaaattctgctcaagcatttctcccagaacaaagcctaaaatcagcggtgacatcgggaagttcatttttcgcagcagatagccaaagacgcccagtccaaccatcaagaccagatcaaatgtggtgctgtgtaccgcatagaccccgactgcagaaacggcggcgatcgccggcactagaaaccataggggaatggtgagcattcgggtgaaaaaaccgaccaatggcagattcatcaacagcaacatcacgttggcaatcagtagcgaagcaatcaatccccagacgatgtccggctgctcggtaaacatggctggccccggcgtgatgttatacagcgtcaatgcgcccatcatcaccgccgtggtgcctgaaccgggcacgcctagcgtcagcattgggataaacgaaccgcaggccgaggcattgttggccgcttccggtgccgccacgccgcgaatatctcctttgccgaagctttcgctattgccgctgatttttttctccgtcatgtaagtcagcgcgctggcaatggtagcaccggctccgggcaggatccccacgaagaaaccaatcactgaagaacgcagggttggccccacgcattccgccgcctctttacggttaaataacagacggccggtttttcgcaccagtttttgcccggtactggtgccttctagcatcagcaaaatttcgctgaccgagaacagaccaatcaccaccacgataaactgaatgccgtcagagagatggacgctgtcaaaggtgaatcgatataccccggtgttggcatcgacgcccaccgttgccagccccaaaccgattaatgctgccaatagtgatttaatcggattctggctcatcatgctgcccaggcaagcgatggcgaacaccatcagtgcaaaatactctgccggaccgaatgagagcgaccattgcgccagcaacggtgcaaatagaataatgccaccaatggcaatgattgaaccgacgaaggaacttaccgctgagatagacagcgcaatgcctgcgcgcccttgctgcgccatgggatagccgtcgagcgcggtcataatcgccgccgcatcgccggggacattcagcaatatcgaggagatacgtccgccgtattcacagccgatataaaccgttgccagtaaaatcagggcagattctgctggcagctttaaggcaaacgccagcggcagtaaaatcgccacgccattgattggcccaagaccgggtagcaggccaacgatggtgccgataaagcaaccaatcagggcaatcatcaggttttgtggcactaatgccacttcaaacccttgggataaatacatccaggtttccattattgcctcgttagttcagccaaacgccgagcggtagggtgacatccagtaagtggtcaaaggcataaaataaagcaataccgataaccaccgccgatagcagcgcctgaatcaggctggcctggaacaacagcgctatgctgaaggtcaacaaagccgtagcgagtggaaatccgagccattcaaaaccccagccatacagcaccagcgtaatgatcatcaccagcaaacgctgtaatactttactgtgcggccaggaaacggtttccggcttgcgcagcagtaatagcactgcacacagggtcattaacgccagaatagcgatagggaaaggccttggccccagtggttcatagctgtattcgctttgaattccccagccgataaacaagccgctgacgcacagcagaatccagataccggcaaaaatgcggtcgctcatcatctacctccgattacttagctaaaccaaaggctttggcttgttcacgatattgttcaacctgatttttgacgtaagtatccaatgctttgccgcttagattgaattcaaacagcccacgcaagtcgcgctgctttttaaactcttcggtttgagtcaaggtgttaaaggtgttaatccaccattggtattcttcttcagtcacttttggccctaaatagaaaccgcgaataattggccacaccagattgaagccttgctcttttgccgtaggaatatcagccagttggccgggcagacgctgttcggaatacaccgccagcacgcgcagtttgtcaccgcttaaataaggcaccatttcgcttaaatcgccggaaactgcctgaatatggttacccagcagcgccgttaccggctcgccgccgccttcaaaagcgacgtagcgcattttgtgaggatcaacgccgacttcgcgcgccagcaacgcggttttcatccaatcctgacttccaatggatgctccggcaccaaataccacgctgtttggatctttcttgaacgcatccatcagatctttcagcgttttatatggagagtcgctgcgtaccgcgatcatgccgtaatcggtgccaaccgcggccagccacttcacgtcattcgcgttataacggccgaatttgttttgcgacagattcagcagcgagccgccggaaaatgccacgacggtgccgaattccgccggacgctgcgccactatggcgttataggccacagcgccaacaccgccaggcatgtaggtgacgcgcatcgggcggtcaatggctttggtttcctgtagggaaacctgaatcaatttacaggttaaatcaaagccgccgccgggcttggcgggagcaatacattcggtgcgcttcggtggatctatcgccaaaacttgttgtgcggctaacatcaggacggaagcggtgagagcacgggtaattatatttttcatagcgattcctaagttattttcttacaaactgtgagccttcccgcgattgcgaggttgctgaattgttaaaacaataacctttcagttacctttcaacggtcaggaaaaagtacaggatgtgatatgcgtctcttgttggtagaagatcatcccgaattatcccattggttacagaaggctttgactcacgcggggtttgccgtggatatcgcccatgatggaattgaagccgagcatttgctgcaaaacgaaagctacgctttagtcgttttggacgtggccttgccgcgcttgaatggattagaggtcttggcccggttacgtaaacgtggacaaactttgccagtattattgctgacggcgcgcaccgaggtagcggatcgggtaaaaggtctcaatctgggcgcagatgattatctcaccaagccttttgaactcgacgaactggaggctcgcattcgcgctttactgcgtcgcagcgtgggcgtgactcagcaagctctgcaatttggttctctgacttatcacgatgagggatattttttactggacgataaacccttggcgctgacgcctcgagagcttgcggtattgaccacactgatgcatcgccgtgggcggccagtggcaaaacagcaattatttgagcaggtttttaccttgtcggaggaagctaacccggaaagtattgagctgtatgttcatcgagtgcgtaaaaagttgctggggagcgatgtgtcgatcatgacattgcgcgggttaggatacagtctggaatgcgaacatgggcagggctaaaggcgctggcctgacaacgtctcgttcgttattccatcaattattggtgtttttcgctctacctttactgattctcggcggcctttcgatttatacccattatatcagtgcgatgaatgcggcaacgctggcttacgatcgctcgctgttagcctcggccagaaccgtcgcggaacggctggtagtgagaaacggccgtttggaagtggatgtgccttacattgtcctggatagtttcgaacgtaacatgaatgatcagctttattatcaggtcattacgccggaaggcaaaagcattgccggttacgatgatttaccgccgctaccgcccaatacgccgcgctcgaatctttatcccgcattggtacatttttatgatgctcattatgacggaaagccgattcgtgtggctgcgctgtatcagccggttaacgaagagggcgtaatggggatggtgatggtgctcgtggccgaaacgctggcatcgcggcataatctggcgcagcaaattatggtctctgcggtgctcactcagggggctttagtgttattcacgctggctatggcttatctgctgttgaagcgaattcttaagccgctacgtaaactctccagcctgatgttactgcgcgatcccggtgagttaacgccactgcctaaaattctcccctggtctgaaatggcgccgttgctgctggcatttaaccgctatatccagcggctgcgggaaatggttgagcggcagggacgattcagcgccgatgcttctcaccagctgcgcacgcctctggcggtgctgaaaacgcaggctgcggtggctctggctagcaacgaaccggctcagtggcgtgaaagcctacaggcgatgaaacacactctagataacacggtggcgctaactgaccgtctgttgcagctttcccgcgttaaagtggtagagcgaactctgcaacctgttaatctctctcaattattgcgggacgcttgttttgcccgtgtgccgcaggcgcgtagcaagcatattgatttgggttatgaaagtgatggggagtaccgaattgcaggggatgggctgctgctggccgaactgtgcgataacctgttggataacgccttgaaatacacgccagacggtggaacggtcactgcacgcttgcatcaggatcagcatattgatcactgtattttggaaattgaggacagtggccccggtattgccgataacgaaactgaacaggcgcttatcccatttcaccgtttggataacgttggcgaacagtccggagccggtctggggttagcgttagtcaaagatattgccatctaccatcaaagccatccggagcttctgaccgggggaaatctgggcggactgctggtacgtatccgttttcatttattggctcaatctattggtaagcctaatgattaataaaatcgctgtatcaggttttcaataactgtgtgctgcgagcggagaagggtgtgcagctcagtcaggcttaaatcgctgaaatatgatgttcaaagtaataggaatgacaatcaacgtactggtacagtatagtgatagatgatatgggtataactttgatggtgtcgataggttatatcttggtagtaaaggtgaatgaaaacaatccagtatgaaatataagcggtaacggtgtttttgttttttctgtataaatggtcttctcaatctcagcgatgaagtattaatgagctatcaggtccttgcccgcaagtggcgtccccaaacttttgctgaagttgttggtcaggaacatgttctgacagcgctggctaatggcctttcgttaggacggattcatcacgcctatcttttctccggtactcgcggtgtcggtaagacctctattgctcgtttattggcaaaagggctgaactgcgaaaccggtattaccgccacgccatgtggcaaatgcgccaactgcctggaaattgagcaggggcgtttcgtcgatctgatcgagatcgatgccgcttcgcgcaccaaagtggaagatacgcgcgaactgctggataacgtgcaatatgcgccagcgcgtggccgctttaaagtttatctaatcgatgaagtgcacatgctttcccgccacagtttcaacgccctgttgaaaacgctggaagagccgccttcacacgtaaaattcctgctggcgacgacggacccgcagaaattaccggtgacaattctttcccgctgcctgcaatttcatctgaaagcgctgtatgtggaacaaattcgtgctcagcttgaaaaagtgcttcaggctgagcaaatcgacagcgatgctcgcgcgttacaactactggcgcgtgcggccgatggcagtatgcgtgatgctctgagcctgaccgatcaggcggtctctatgggccaggggcaggtgaccaccgcgacggtcagccagatgctgggaaccttggatgatgaacagccgctggcgatcatcgaagcgctggtgagcgccgatggtgcgcgggtgatggcgcagatagaacaggcggcgtcacgcggtgtagattgggaaaacctgttggttgaaacgctcagtctgttacatcgcattgcaatgattcaattgctgccatccatgctggataatcattacgcagaaatagaaccgcgtttacgtgaactggcgcgtactttgccgccaacggatattcagctgtattaccagacattgctggtggggcgtaaagagctagcttatgcgccggatcgccgtatgggtgttgaaatgacgctgttacgcgctctggctttccacccaaaagcggttatcgcggagccggaagttgttccacagattccctctccgatcggtgcgccgactcatgctataccgcagcgtcacgccgcgccgcagccggtaacgtctacaccagctcggtcagagccaatgccgccagcatcggtgccggaatctaccgctcagctattgcaggcgcgaacccagcttttacgacagcatgggacatccagcccaaaaaagaatgagccggcagcgcctgacaaagcgcggccggcaatctcggctctggagcgattggcttcagtaaccgagcgtagtcagcagcgtcaggctgccaaagccaccgaggcgaaaccgggcaagaaagaggcgtatcgctggaaagcgcaaaacgaacctgaaacgccgccggagccagttgctacgcctaaagcgttacgttcggcgctagaacatgagaaaacgccggagctatcggcaaaattagcggaagaggcgattcttcgcgacccttgggcggcggagataaatcagcttcagatccctaaattggttcagcagttggcgctgaatgcatttaaacaacagatagaaccgggtaatatttgccttcacctgcgttcgtctcagcgccatctgaattcgccgtccgcgcagaaagtgttgacggaagcgttaagtgggttgtacggcagcccggttgaactaagcgtgattgaagacgacaatccggcggagctaacgccgctggaatggcgacaggcaatttatgaagagaagctggcgcaggcgcgtcagtcgattcttacggataagaacattcagactctgcgtcgattctttgatgccgagctggatgaagaaagtatccgacctatttaatcgctgcggtacgtgcatggtgcacagacgcggcccttgctgtgagagaagactatgtttggtaaaggcggtattggcaatttaatgaaacaagcccagcagatgcaggaaaaaatgcagcagatgcaggaagaagtcgccaaattggaagttaccggtgaagctggcgcgggcttggttaaagtgactatcaacggtgcgcataactgccgccgcgttgaaatcgatccaagcctgctggtggaagacgataaagaaatgctggaagatttgattgcggccgcattgaacgacgccgcacgccgcattgatgaaacgcaaaaagagaaaatggcctccgtatccagtggtatgcaactgccaccgggctttaagatgccgttctgatgcaaaccagcccactccttgaaacattaatggagtcactgcgctgtttaccgggcgtaggcccaaaatcggcgcagcgtatggctttccacctgctacagcgggatcgtagcggtggaatgcgtctggctcaggcgctcacccgcgcgatgtcggaaattggccactgcgtcgattgccgtacttttactgagcaagaaagctgtaccatttgcgctaatcctcgccgtcaacaaaacgggcagatttgcgtggtggaaagcccggcggatattcacgccatcgaacaaaccgggcagtttggcgggcgttattttgtcctgatggggcatttatcgccgttggacggtatcggccctgcggatattggtctggatctgttggaacaacgcctcgccagcgaaagtatcagcgaagtcattctggccactaacccaacggtggaaggtgacgcaacggctaactatatcggccagatgtgcggccagtatggcgtattggctagccgaatagcgcatggcgtgccggtgggcggcgagttggaaatggtggacggcaccacgctgtctcactctctggctgggcgacatccgatcaaatattgatcctttttcaggtcaggcggcggtttattattgattatcatatgaataatatcatttgagataatctggccgtcgcccctgcttatgctttttttctctcaaacatcacttttcagacttgaaacacctccttacaacccccatctgatctccatcattcggctatatccgcctgcacagtaatttgcattgaggtaactaatgagtatgaaaggtcaagaaacccgtggttttcagtctgaagtaaaacaactgcttcatttgatgattcactcgctttactccaataaagaaattttcctgcgcgagctgatctcaaatgcttcggatgcggccgataagctgcgtttccgtgcgctttctgcccctgaattatatgaaggtgacggtgaactgcgcgtccgtttgtcttgcgataaagaaaaacgcactctgacactgagtgataacggtatcggtatgagccgcgacgaggtgattgaaaacctcggtactatcgctaagtccggcaccaaagcattcctggaatctattggttccgatcaggctaaagatagccaactgattggtcagttcggcgttggcttctactctgcttttatcgtggcagataaagtcaccgttcgcactcgtgccgcaggtgcaccggcggatgctggtgtgttctgggaatcagaaggcgagggcgattacactatcgctgacatcaccaaagaagatcgcggtactgaaatcaccctgcacctgcgtgaaggggaagatgagtatctggacgattggcgtttgcgctcaattatcagcaagtattccgatcacatcgctctgccggtggaaatcgaaagtaaaaacgaagaagacggcaccgttagctgggaaaaaattaacaaagctcaggcgctgtggacgcggagtaaagccgatgttagcgatgacgaatataaagcgttctacaaacacatcgcccatgattttaccgatccattaatctggagccacaaccgcgtagaaggtaagcaggaatataccagtctgctgtatatcccagcgcaggcgccttgggatctgtggaaccgcgatcataaacacggcttgaaactttatgtgcagcgcgtgtttatcatggacgacgccgaacagtttatgccgaactatctgcggttcgttcgcggcctgatagattctaacgatctgccgctgaacgtatctcgtgagattttgcaggacagtcgtattacccagaatttgcgtagcgctctgagcaaacgcgtactgcaaatgctggaaaaactggcgaaagacgatgtggaacagtaccagaagttctggcaacagttcggtatggtactgaaagaaggcccggcagaagatggcagcaacaaagaaaccattgctaaactgttgcgctttgcttcaacccataccgacagctcggcgcagaccgtttcgctggaagattatgttagccgtatggctgaaggtcaggagaagatttactacattactgccgacagctatgccgctgcgaagaacagcccgcatctggaactgttccgtaagaaaggcattgaggttctgctgttatccgatcgtattgacgaatggatgatgagctacctgactgaattcgatggcaaagccttccagtcagtgagtaaggccgatgaatccttggataaactggttgatgcagaaactccggagcagcaagaagcggaaaaagcactggagcctttcgttgagcgcgttaaaacgctgctgaatgaccgagttaaagacgtacgcttgactcatcgtttgaccgacacgccagccatcgtcaccacaggtgccgatgaaatgagcacacaaatggcaaaattgtttgccgctgcgggtcagcaagcacctgaagtgaaatacatcttcgagctgaacccagaacacgcgttggtaaaacgcgccgcagaagtcagtgatgaaagcctgtttgcggagtgggttgagctgctgctcgatcaggctctgttggcagagcgcgggactttggatgatccaaaccagttcattcgccgtatgaatcagttactgacagcctaatttgcaatgcgattgcccctgaccaaaagctcggttaggggcattttaaccgcacaatcacggcttttctctgccaaatcaattcagttagtctcatttcttcaattacctcctccggcaaggtgccttgagcgatcacccgtggaaatggtatggttacgcgttttctgcattttcgatttcattctagtaaaaacacatagaaaaactacatagcaaggggatttacgcaatgcgtatcattctgctgggcgctccgggcgctggtaaaggaactcaagcgcaattcatcatggagaagtacggtattccgcaaatttccactggcgatatgttgcgcgcagctgttaaagccggttcagaattgggcttaaaagcaaaagaaattatggatgctggcaagctggtgaccgatgagctggttatcgcactggtaaaagagcgtatcactcaagacgattgccgcgacggcttcctgcttgatggtttccctcgtaccattcctcaagctgatgccatgaaagaagccggtattaaggttgactacgtcctggaatttgacgtgccagacgaactgatcgttgatcgcatcgttggtcgtcgtgtccatgctccatctggccgtgtttatcacaccaaattcaacccgcctaaggttgaagataaagatgatattaccggtgaagagttaaccattcgtaaagacgatcaggaagccacggttcgcaaacgtttggttgagtaccatcagcagacggctccgctggtttcttactatcgtaaagaagctgatgcaggcaacacccagtactttaaattagacggaactcgcaaagtttctgaagtaagcgctgaattagctactattttgggctaatatgctgagtagacaaagaaggcggccttgggtcgcctttcttatttatgtattgcagaggtgaagtagcagggagtttatatttatggccgcctcgctataatggcagtaaataaacgcgctgtgtgtcgcgggtttaaatacattgcagcttattagtaaaggaagggaactgactcatgcaaagcaaacttggcgttctgatggtcaatctgggaacgcctgatgccccaacgactccagcgattaagcgttacctggctgagtttctcagcgatcgccgagtagttgatacttcccctttgctttggtggcctttattacgcggtgtcatactgccaatccgctctccgcgagtggctaaactgtatcaatcagtttggatggacgaaggctcgccgctattggtttttagtcgtcggcagcagcaggcgctagcggcccgaatgccggacacaccggtagagcttggaatgagctatggctcacccaatttatccgatgccatagaaaaactgttggcacaaggcgtaactaaactggttgtgttaccgctttatcctcaatattcctgttcgaccagcgctgccgtatgggatagcgttgcacgtattctaaaaaattatcgtcgtttaccttctatcagctttattcgtgactatgcagagcatcctgcttacattgccgcattaaaacaaagcgtagaacggtcttttgagcagcatggtcaacctgaccgtctggtgctctctttccacggaatccctaaacgttacgcacagcttggtgacgactatccgctgcgttgtgaagatacagcccgcgcgcttacggcggttgtgccgctgcccgcagaacagatcatgatgacctaccagtcacgatttggccgcgaaccctggctcactccttatactgatgaaaccttaaaaagcttaccttctcaaggtgttaagcatatacagctgatctgccctggcttttccgctgattgtcttgaaacgctagaggaaattaaagaacaaaatcgtgagattttcctacatgcaggcggcgagaagtttgaatatatccctgcattgaatgatgatattgcgcatattgacttgcttgagttattagttaaacggcacatgtagtgccttgctaaatataagcgctctatatatagagcggcttatgtttagctgaaagtttgatttttaaatactcgaagacatgaagaaaatcaaatgaatacattcggttacgatttattgtgcaaagggcattctccggattttctcgtattatcttagtcaattaaagcgtggcataaatcacgtttttcttgtaatagcggggtattagtacgagaattggcacaaaattttaatgccttaattaaatgaatgtttaacttaaaatgtgtctgctgtttaggaatgctctgagaccgatttaaggccaaagcgcgtaccctcaagccccctgcggggccacagacctaaaccttcgaatcagtgcattggtagctgcaagccaagggcggtagcgtggggattttattctatttatacgacgatgcctttcatggatgaagagatcgctactccatgcattttgttaaaatcattcgctaagattaattcttaaaaagataaaaatcagtgaggcgaattaatttacttatttaaatttatttaattcggatttatatatgtctttagaaattaaattgcatccatccggtgttatttttacttctgatggtactgaaaccattctggatgcggcacttgaaaataatatcaatattgagtacagctgcaaggacggaacctgcggcgcttgtaaggctgttgtgctatcaggcgaggttgagcaaggtgagaatacattcttatccgaagaagatattgctaagggttcaatactaacttgctgttctaaagcaaagtctaatgttgaattagacgttcattattatcctgaacttagccacataaagaaaaagacttatccctgcaaagttgacaatattgagtatcttggcgaagacattgccattttgtcgctaaggcttccacctagcgccaatatggagtatttggctgggcaatatattgatttaataattaatgggcaacgccgtagttattctattgctaacgcgcccggcgggaatgttgagctgcatatacggaaagttgctaatggacttttcagtcatatcatttttaacgaattaaaaccacagcaactcttacgtattgaagggcctcagggaaccttctttgtgcgtgagaataatgaacctattatattccttgccggtggtacaggttttgctcccgttaagtctatggttgaagcattaatttctaaaaatgatcaacgtgaaatgtatatttattggggaatgccgacagggaatagtttttattccgatatcgcaagggaatgggcaattcagtaccccaatattcattatgttcctgtagtctcaggtcatgatgaaagttggactggtgcaactggatttgtacatcagtcagttcttaacgatatcgccgatctcagtctatttaatgtttatgcctgcggttccttagctatgatatctgctgcgcgcgctgattttataaagaatggattaaacgaaaataaatttttctctgatgcctttgtgccatcaaaatagctttgatttgtcaaagtaatacgtaatggagattctagtgaaagcagtcattcttgccggtggtcttgggacccgtcttagtgaagaaaccgtagttaagccaaaaccaatggtagaaattggggggaaaccgatcctctggcacattatgaaactttattcatcctacggaataaatgattttgttatttgctgtggttataaaggctatgtcattaaagagtattttgcgaactactttatgcatatgtccgatattacattctgcatgcgtgataatgaaatgacggtgcaccaaaaacgcgtcgagccttggaatgttactttggttgataccggtgagaattcaatgactggtggccgcttacgtcgagtaaaagattacgttaaagacgatgaagccttttgcttcacctatggtgatggtgtcagcgacgtgaatatcgcggaattgattaaattccataaaaatcacggtaagcaagcgaccttaactgccacttatccgccaggccgtttcggtgctttagacatcaaagataaacaggttcgtagctttaaagagaagcctaaaggtgacggcgctttaattaacggtggctactttgtcctgtctcctaaagttattgatctaattgatggcgataactcaacttgggagcaagaaccattaatgaccctggctgagcagggcgaactgatggcttttgagcatacaggtttctggcagccaatggatacactgcgtgacaagctctacctacatgaactgtgggaagaaggacgcgcaccttggaaggtatgggaataaaaaatgattgatgcaagcttctggcaaggtaaacgtgtttttgtaacaggtcataccgggtttaaaggtggatggctgagtttgtggttgcagaacatgggggcaacggttaaaggttattctctggctgcgccaactgaacctagcctatttgaaactgcccgcgtagctgacgggatggaatcagaaatcggtgatattcgcgatcaacaaaaactattaaactcaattcgtgaatttcagccagaaatcgttttccatatggcggctcaaccgctggtaagactatcctactcggaacccgttgaaacatactcaactaatgttatgggcaccgtctatttactggaagcaatccgtcaagttggtggcatcaaagctgtggttaatatcaccagcgataaatgctatgacaataaagaatggatatggggctatcgcgaaaatgaagcgatgggaggatatgacccatattccaacagtaaaggttgcgctgagttagtcacatcttcttatcgtaactctttctttaatccagccaagtacgatcagcatggtacagcactggctactgtccgcgccggcaatgttatcggcggcggcgattgggctttggaccgtattgttccggacattttacgtgctttcgaagagtcaaaacctgttattatccgcaatcctcacgccattcgtccttggcagcatgtgcttgaaccgttgtccggttatattttactggcgcaaaagttgtacaacggcggcgtagaatatgccgaaggctggaactttggtccgaatgaagcagatgctactccggttcaaaatattgttgaaaaaatggtcgaattttggggtgatgatgcaagttggcaattggatggtaatgaacatccgcacgaagctcactatttaaagttagattgttcaaaagctaaaatgcaacttggctggcacccacgttggagccttaacaccacgctggaatatattgtggcctggcataaagcctggctagccggcaaagacatgcatgaatatagtgttaccgaaattaataattacatgaaaactagatgatttgaggtcatagaaaatgagtcaagaagaattacgtcaacagattgctgggctagttgctcagtacgctgaaacggctatggcccctaagccatttgaagcaggtaaaagtgtcgttccaccttcaggtaaagttattggtgctaaagaacttcagctgatggttgaagcatctttggatgggtggttaaccaccggtcgttttaatgatgcttttgagaaaaaactgggggaatatctcggtgttccttatgtactgacaaccacgtcaggatcttcggctaacctgctagcgcttactgcgctgacctcgccaaaacttggtgcacgagcgttgaagccaggcgatgaagtgattactgttgctgctggtttccctactacagttaaccctaccattcagaatggcttaattcctgtcttcgttgatgttgatattccaacttataatgtgaacgccagcctgatcgaagcagctgtcagtgataaaactaaagccattatgattgctcatacgctgggtaatttatttgatctggctgaagttcgccgtgtagcggataaatataacctttggcttattgaagattgctgtgatgcattaggttcaacctatgatggcaaaatggcgggtacatttggtgatattggtaccgttagtttctaccctgctcaccatattactatgggtgagggtggggcggtatttaccaaatcagcagaactgaagagtattattgaatccttccgtgactggggccgtgactgctattgcgcaccaggctgtgataacacctgtaaaaaacgctttggccaacaactaggttctctaccattcggttatgaccataaatatacctattctcacttaggttataaccttaaaattacggatatgcaggctgcctgtggtttagctcagcttgaaagcgtagaagaatttgtagaaaagcgtaaagccaattttaaatacctaaaaagtgctttgcagtcttgtgagcaattcctcgagctgccggaagccacaccaaactcagatccatcttggttcggtttcccaataacgcttaaagaagacagcggtgtaacccgtatcgatttggttaaattcttagatgaagccaaaattggtacacgtttactgttcgctggaaacttaacgcgccagccgtatttccacgacgtgaagtatcgtgttgtcggtgagttgactaatacagaccgtattatgaatcaaaccttctggatcggtatttatccaggcctgacacatgatcatctggattacgtagttagtaagtttgaagaattctttggtttgaatttctaataggagtcaggaggcaactattgcctccttttaatatgaagatacttattaccggtattagtggctatctcggtagtcaattagcaaattcgttaatcgatgaacatgagatagcaggaactattcgtgaaaactcttcatataagcggttgaataatccggataaaattagattaattgatctatctgaaatggattggttattgaaaataaacgattttgatccggatattgtcatcaatactgctgcattatatggccgtaatggtgagccgctttctcagttagtacaggctaatgtccagtttccgttgctaattttagagatgctttcttctaatggttctggtgttttcctaaattgtggaacatccttaccttcgaatgttagtgattatgcattaactaaaaatcaatttagcgaattggcgaaaaagtatagtgatagatttaccgggaagtttatagatttaaagttagagcatttttatggcccttatgatgaccaaacaaagttcacgacatatgtcattaatagctgcaaagaaaataataatctaaaattaacagcaggattgcaagaacgcgattttatatatatagaagatctgcttaatgcatttaaatgcctcattaaaaatatagataacttagtatctggtgaaagcataccaatcggttctggacaagcaataacaattagaaaatttgtagaaaccgtagctaaaatcactaattatcaaggcgagctagagtttggagctatacctactcgtcaaaatgaacttatgtacagctgcgcttcattagaaagaatgaatgagcttggctggaagtgtgaatattcactgaatagtgcaattaaagatactttaagtaaggaatagaaaaatgaagcttttgattactggtggctgcggttttttaggcagtaaccttgcatcacatgcaatcaagttggggatggaggttatagtttttgataatttatcccgctatggctcgtcagagaatctacaatggttacgttctatcggtgattttacgcatgtgcatggtgacattcgaaacaagaatgatgtaaccaggttaattcagaaattcaaacctgataatgtatttcatcttgctggtcaagttgcaatgactacatcaattgataatcctcaaatggactttgaagttaatgttggtgggacatttaatcttctagaagcaacccgtctttttaatcccgaatgtggaataatttattcatctactaacaaagtatatggagatcttgagcagtttacgtatagagagaataaaactcgatatgaatgtatcgaaaagccaaatggatttgatgaaagtgttcaactgaccttccattctccttatgggtgttctaaaggcgctgcggatcaatatatgcttgattacgcgcgtatttacggccttaaaacagccgttttccgtcattcttcaatgtatggcggccgccaatttgctacttatgatcaaggctgggttggctggttctgccaaaaagcggtagaagctaaccgtgggattaaagctccgttcaccatatcaggtaatggtaagcaagttagagatgtattacatgcagaagatatcatttcactttatttctcaactctagctaagttggatttggccagaggcaatgcttttaatattggtggaaccatacagcacagtctttctctgttagagctattttcattattagagaagtattcaggtgtagaattaaattatacccaattgcctgttcgggaaagtgatcaaaaagtttttgtagcggatataaataagattaataaatttactgactggtcaccgaaggttgatgctagtgaaggtgtcaggaaaatgtacgactggtgtaataactactaattatcataagcagcggcatgcgagctcagagcatgctgcacaacaaacactttataaatggaatattgtggaactttttataaagaaaataccaactcatatatgggttgctttatcctcgtgggtatctagaataatttctgcagcaattcaacttttaagtattagatacttgctagatatgatgggcgaaaatggctacgctgcctttactttacttgccggccttgttgcttggggaacgttggctgactttggcattggatatagtttacaaaattttatatctgagcaaagggcaaataagaaaaaatataatgactatatattgacatcagcatgcttaatattgattggtatattggttttgatgtcaactttatggccattaacaaagtttttagcaccagcatatttgcaagggtttgatgttcatacaatatctgacaagcatttattgctatacatcactctttgtatttttattttcaccagttttggtggggttctatataaaatatggtttgcggaacaaagaggttggattgctaatgtaattactgcattgtcttctttgctaggccttatgctaataattatattcagtaaatatagagcatctgccagtatatatttagctgttattatgttttttggtccggcagcactaatacctgttgtgatattcattgcaagaattctcaaaacattcaaaactgaatcaattaaaaaatttaattttaatctagttaataaagtattgaagagagcttccggttttgtgcttttttcttttttagctacaattgtcctccaggcggattatattgtaatgtctcaaaaattagccgctagtgatattatcatttacacggtattaattaaagtgtttggattggttctttttgtttattctgcattgttacaggccctttggccagtatgtgccgaatatagggttcaaaataaatggtctgagttaaattcaatcgtaagtaaatatataacattaggtgctatttttatcatcgtttgtagtattggtttttatctatttaaaatacaaatcattggtcttatctctaaaaaaataaatactaatatagatattacaacgatagctttattttgtgcatatttccttttgcggatttggtctgatacatatgcgatgctgctacaaagcatgaattatttacggccattatggtatttggtacctgttcaagcaattctgagtttgagcctccagtggactttagcatcagtttacgggatgaaaggtatgttaactggattgattttatcttttttatttactgtggttatatttcttcctgttttctataagagaaaaataagagaactacagtatgtctaatttattttaaatggttgaaaatttataaatatatatattttaaatccatttgaaaagttttcctgtgttctcaaagagtgtttaaaggattttagatgaacagcattaagatttcattttgtattccaacgtataaccgctgcgagttattatctgagctgatcggtagtattatttctcaggcggaagatagagatgatatagaaatctgtatttcagataatgcatcaacagataatactaatgaaatgataagctcttggagagagaaaacacatatcccaataatttataaaaaaaacagtgaaaatataggtcctgataaaaactatttagcttctgtcgctttagcttctggtgaatattgttggttgtttggcagcgatgatgtcttatctgataattcattagaaaagatggatgaatatttaaaaacaaattgtgaaatatacttgtgtgatcgtaatgagtgtgatctggcaatgcggaaagttgcttataggccttggatgactaccggcgatgtaatgtattccaccgagaatcatcaagaactaatacgatatttttcatgtagcaattcaattggagctgtatttagttttttaagctctattatagtaaaaagaagctcttgggagaatgtatcctttgatgagtcatttattggtagcgcatatagccatgttttttatctattagatatcgtgaagcatggtgcaaaaatccagtatataaataaaccattagttgatactcgacttggaaatgatttctttgccaaagacggtgtagtgagaagaatagaaatagactttaatggatatataaaattggctgagaaattctaccaaaactaccctaatgtaaagtccgagtttttggctattttactgagagagcattcagtcctgcatactaacatattaacctctgtatatggtgaaaagggacaaagagacagaatgaaacatcattttaaatacgctggcgctaatgcatttttggttgattttgtttattttgctaggcctttatatttattttcttcaaagttaaaacttgagtttctgtataaaaaaattcgtagattcctatataaatgatgttttatcgtttatatatttttacaaagcgccactttttattgtgagaaaaaaaatgttcgctgtaaataaaactattactgtctatgtttcactttatagcatgtctttgtggatcgcttttatcagcagtatcgtcaccggtcaatttaatggtgatctggtcggtatagatgttggacttgataacactactctattctatattgccctatttaatcagataataatattagcagtgccattattatataaaatagtgacacattataaattgagtttagggggataccgatttaatataaacataaatagattctcactatttatgtttataataataacaatgaatttagtgtttttcttgacaactggtgttggtaaggtcttcagcaaagagactcatccattagcacctttattcgtaattatagcacctagtggtattttttatttttactatcttatttctagagaaaaaagtggggtgttattttttttgaatgtttttttatattcatctctggaaataatgaaaggatggaccggatttatactggttcttgcaatttttgagatgtatttttttatcttaaggcacaggaattctaagtttttaaaaataccatttctattttctatattaatgcctttacttctattgatttttggaggtgcgttaaataagcatgtttttgttttaaaaaatgaaattagagggaattatgttaatgctgatgaattaagttattttgattctatcagtttgttgagtagtagattgactaatttttctgtgtctgcgggaatgtattcacgagttgaaagtgtcgtatccacggcaaaggaccagggggagtttactgagcttaaaggctttgcacgtagactgtttccaggggttattgaggatactggtttcaggactttaagtaattccacgatgttagctttttttcccgattatggtgagcaatctaacgtcgatactggtgtattaatgtattactatgtgctatttaaagctgatccatatggtgcagtattctcaattttattatcattatttttacttgtaagccttgtcgctttttatcgggcgatttcaaataaccataataatataaatatttttatatttattatgatattttatctattttacactgcttctactgaggcttcttttgttcggccctatataactggcgttatatttttccctcttctcttttctattggtgttattaaaattagaaagaagagtttaggcgatttagggggtgaagataaggtgagaaatgtgtaatttactgactcagccataaagttatatcaatacctggttatattaagtttttcattgattgcaggatctttatgaaaatagtttatgatgggattattaattcactgcaaagtaatggcggtattactgtttattttaaagaattagttactcgtctgcccagtgggaattttgattggtactcttacgataataaaattggtgatgtaggcgttaaaagtattgatcttaaaggccgtctttttgaacgctatagagattgcttattaccagatataaataaagatatatctccaatatttcattcatcctactatcgtctgcccaaagagcatatgcctgtagttacaactgttcatgattttacatatgaaaagtttgtcagcggtcctgcgaaatggatacacacatggcaaaaaaatagagcagtgaagcatagcgatttgattatttgtgtttcggaaaatactgcgaaagatttacagtattattgctctgtccctagtgataaaattagaattattcacaatggtgtgtcggataaatatcattctttaacgccaaccaaaactaatacgaataaagttatctttgttggtgcccgtggcggatataaaaatttcgatattgccgtaaaagttatatcgcgactccctcatcttgaattatctgtggttggtggcggtgagtttactgataaagaactatcactattaaatcagcatctaccccatcgctatcattggttggggcggctgagtgatgaagctttgaatgaggcttacaattctgcttatgcactactatatccgtcgagttatgagggattcggtattcccatcctagaagctatgcgtgccggatgccctgtagtcgctgtaggagtgtcttctataccagaggttgctggagatgcagcgatattagtgagccgccctagtgtggatgaattagtcgaaggcttagtcgcgatagataatgaaagatctaagtttattgaatttggctttcagcaagcagctaaattctcatgggataagtgttatcaagaaacactcaatgtttataaagaattgaataaataatacggattacaatattatgactaaaattgcgcttattacaggtattactggacaagatggttcttatttggctgaattcttattagaaaaaggttatgaggttcatggtattaaacgccgcgcctcttcctttaataccagccgtgttgatcatatttatcaagaccgccatgaagaaaaccctcgcttctttttgcattatggcgatttaactgatacttccaatttgattcgcttagttcaagaaattcagcctgatgaaatctataacttaggtgcgcagtcacatgtggctgtttcatttgagtcaccagaatatacggccgatgtcgacgctatggggacgttgcgcttattagaagcgattcgcattaatgggttggaaaaaaagactcgtttctatcaagcgtcaacctcagaactttatggattagtgcaagaaacccctcagcgtgaaactactccgttttatccgcgttctccttatgctgtggccaaaatgtatgcttattggattacggttaactaccgtgagtcttatggtatgtatgcgtgtaacggcatattgtttaaccatgaatctccacgtcggggcgagacatttgttactcgcaaaattactcgtgctgtagcaaacattgctttgggtttggaaaattgtctctatttaggcaatatggattcgttacgtgactgggggcatgcgaaagattatgttcgtatgcaatggatgatgcttcaacaagagaagccagaagattttgttattgcgacgggtaaacagattactgttcgcgagtttgttcgcatgtcggcaaaagaagctggaattgaactggagttcagtggtgaaggtgttgatgaaatagctactgtagtggcagtgagcggtaatcatgcctctgcagtgaaagttggcgacgttattgttcgtgttgatccccgttatttccgccctgcagaagttgaaacactactgggtgacccagcaaaagctaagaaagttctgggttgggttcctgaaattacagttgaagaaatgtgtgctgaaatggttgcaagcgacttgcaacaagctaaacagcatgctttgctgaaagctaacggttttgatgtatccatttcgttggagaattgatgataatggataagaaacgggtatttgttgcaggccatcgcggcatggttggctctgcgattgtgcgccaacttaagaatcgcagcgatattgaattggttctcaaaactcgcgctgaactagacctgatgtctcaagccgcagtgcaggcattttttactgatgaaaagatagatgaagtctatttggccgcagcgaaagttggaggaattcaggctaataataattatccggcagagttcatctacgaaaacttaatgatcgaatgcaatattattcatgctgcgcacttagccaatgtacaaaaactgctattcctaggttcttcgtgtatctatcctaaactagcagaacagccaatgactgaggccgcactgttaactggtattttggagccaacgaatgagccttatgctatcgctaaaatagcagggataaagttgtgcgaatcatataatcgtcaatatggtcgtgattaccgtagtgtaatgccaaccaatctctatggtgaaaatgataatttccatcctgaaaattcccatgtaattcctgcattattacgccgtttccatgaggcgaaattacataatgatgaggaaatggttgtgtggggaacagggaaaccaatgcgcgaatttctacatgtagatgatatggcagctgccagcgtacatgttatggaattatctaaccagatatacgctgctaatactcagcccatgctttctcatattaatgtcggtacaggtgtagattgtacgataagagaattagctgaaactatggcaaaagtggttggattcacgggcaaactagtctttgacacaacgaagcctgatggaactccgcgcaagttgatggatgttagtaggttagccaaattaggatggagttatcatatttccttggaagaaggactcatgatgacttatcagtggttcttagataaccagcataatttcaggaaataatatggctcgtcccttagatacatctttgttcaagactattgtggctaatacgccattgatatctatcgatctcgtcgtccaggattctcagaatagaatattacttggtaaacgattaaatcgcccggcaaagaattattggtttgtaccggggggacgagtaagaaaagatgaaactcttgctgatgcttttacccggctagcaaaagaagagttaggattagctacctctattcaaaatgcggcctttattggcccatttgaacatttctatccggataatttttctgaagaagaattttcaactcattatgtagtgcttggctacaaactggtcattgagacacctttagtacaattgccaaaagatcaacattcccagtattgttggagagcggtcgatgatttactttccgctgacgatgttcatcttcataccaagctctattttcaagacaggaagtaatcgctcatgctattacccgtaattatggcaggcggctctgggagtcgcctgtggccgctatctcggactcattatccaaagcaatttctggctttgacttcagaactcacaatgctacaggaaacgctacttcgattagacgagcttcctcatctagctccgcttgtgatttgtaatgaagatcaccgttttattattgctgaacagctgcgccagaaaaaactctcacatagcggcattgtattggaacctgttggtcgtaatacagccccagcaattgcgttggcagccttgcatgcgactttaaacggcaatgatccgttattactggtattagcggctgatcatgttattcaggataaacctgcatttattcaggccgtaaaacgagctgaacctcttgctgaagctggtaagttggtcacttttggtattgttcctaatagtccagagactggatatggctatatcaggcagggaactccggttgaagatggcgcttatcaggttgctgcttttgttgaaaaacctgacttagctaccgcgcaagaatatttggcttcaggaaattattattggaatagcggtatgttcgtgtttaaagcatcacgctatttacaagagctagggttacatcgacctgatattcttgaagcttgccagttagcaatcgccggtcagcgtgctgatttagacttcattcgactgaatgaagaggctttttataactgtccggatgattcaattgattatgcagttatggaaaaaaccagtgacgcggttgttgtgcctatggacgctcagtggagtgatgttggttgctggtctgcgttatgggaaataaatgataaagatagccagggaaatgttgttcgcggtgatgtattaatcgaagatatgcatgatagttatgtctattctcaaaataggcttgtggcgacggttggagtaaacgatctcatcattgtagaaactaaagatgcggtattagttgcgcataaagataaagtgcaggatgttaaaagtatcgttaacaaactcaaattagaggagcggtgcgaatatctgcaacaccgtgaggtataccgcccttggggctcccacgatgctattgcagaaggtgttcgctaccaggttcaacgtgtgtcagttaaaccgggccagcgcattgcaactcagattcattaccacagagctgaacattgggtcgtcgtatcaggtatagcaaaagttcactatggcgataaaacctatttagtgaatgaaaatgagtctacctatattcctgtaggaattgcgcattcaatagaaaatccgggaaaaataccgttagaaattatcgaagtacataccggaaactatctttcggaaagtgatgtagaacgtgtagataacttaggtgtagggtattaatgatgaaagtaagtattattactgctacgtataatagtgaaaagaccattatagatactcttttgtcgttagagaaacagacacatttagatattgagtatattattattgatggagcatcaaaagataatactcttaaagtgatagatagaaactcaaccagagtttctacaattatcagtgaaccagacaaaggtatttatgatgctttaaataaaggtatcttagctgctactggggatattattggttttttacactcggatgatttgctagctgattcaaatgtcattgccgatgttgttgcaacgtttgaaaataatggatgcgatgcggtatatggtgacttgcaatatgtggcaagggataatattgaccatgtcatcaggtgctggaaaagtggtgattttcgcccacgaaaaatgcagtatggatggatgcctcctcacccaacattttatatgaaacgtgaattatatgagcgttggggcggttttgatttaagtttcaaaatatcagcagattatgactcactaactcgatatattatatctcatcaggttaagttagcgtatttacctcgtgtgctaaccaaaatgagggtcggtggaataagtaatcgttcagttaaaaatatgattcttaaatcaaaagaagatattaagattatgaagaagcaagctttattttggcctgtgtcattaatctgcaaaaacttatctaaaatccctcagttcataaagtgatatatatgtctaaactaacttgtttcaaagcttacgatattcgtggtcagttaggcgaagagttgaatgatgagatagcatatcgtattggtcgagcctatggtgaatttgcaaaacctaaaacagttgttgtgggtggtgatgtaaggctaacaagtgagagccttaaacttgcattgagtcgtggtctgcaagatgcaggtacagatgtattggatattggattatctggtacggaagagatatattttgcgaccttccatcttggagttgatggaggaatagaagttacagctagtcataatcctattaattataatggaatgaaacttgtccgtcagggggccagacccattagtggtgatacaggtctacgggatatacaacgtttggccgaatcaaatgactttccgcctgttgttgagtctaagagagggagctacaagaaaatatcagttattgatgcatatattgatcatttaatcggttatataacgccatccttatttaaacccctgaagttagttataaatagtggaaatggggctgcaggacatgttattgatgctttggaaaagcgttttgataagcttgatatgcctgtaactctgattaaagtccatcattcaccagatggtacattccctaatggaatccccaacccgctactgccagaatgtagacaagacaccactgatgctgtattagcccatggtgctgatatgggaattgcctttgacggcgattttgatcgatgcttcttctttaataataaaggagagtttatcgaggggtattatattgtaggattgctagctgaagcgttcctacaaaaaaaaccgggctcaagtattattcacgacccgcgcttgagttggaatactattgatattgtaactgctgctggcggaaagccggtcatgtcaaaaactggacacgctttcatcaaagaaagaatgcgtgaagaagatgccgtttatggtggggaaatgagcgctcatcattattttcgtgatttctcttactgtgattctggaatgattccttggctgttaattgcagagttgttgtgcgttaaaaataaaagtttggaacaattagtcgaagagtgtatgagtgcctatcctgcatccggtgagataaattcaatattgtctgatccagcctcagcaatttctaaagtgcgtgcgacttatgaaaatgaagcgctggtcgttgatgaaaccgatgggattagccttgagttcaaagattggcgttttaacttacgtagttctaatactgagccagttgttagattgaatgtagaatctcgtgctaataagtcgctgatgctggaaaagacagaagagattttactattattaagatcgtagagattacttgtagttaaaaatatcagctccctgtggatctatatgtttaatataattctctgggtgctaattttagtaacgattatcaattcggtgacggttaatgacggataattttaaagtaaataacagtaattctaaaataccttctgattatggttttcctaatgttaattcatcgaaagatgagatagatttatttgagttaatggctattatttttaaatctaaaataaaaataatatccacaactttgatttttatcattatcggtttggttattacctttattctccctcaacgctggacgagcacagctgtcatcgtctcgcctggcgatgaacaaattcaagtgttagataagataacaactaatttatctgtgcttgatattaagcttgatatcagttcagattatttattgtctacttttaaacaaaactttgattctcaagatctccgtgagcaatatttagtgaatactgagtattttaagagattaatgcgagataaacctgaagatggtctggagaaaagagcattaattgaacggatagtgaatgagaatatcacatcagtcagcccgctgagagataaaggcgataatgataaggaatatcgatactacaaattatcatacagcgccatgacggctacagatgcgcgtgatttattgcaggggtatattaactacgttaacagtatagttaatgctgatgtatctagaaaaatacagcgtgctgttgatttagctaaaggtattggtactgataaatatactttggacctattgcgtgccaagaataatcaggaagttaaaattgaacgtttgaagtacgcgacttcaattgctgatgcggcgggtataaaaaagccagtttacagcagtggttccgctattagtgatgatccggatttccctattactatgggatccgatgcgctgaatcgtaaattggaaattgagaaatcggtgactgacctggcttctatcaatgctgaaattcttaaccgtagactgtatcttgataagttaaatgcgctggaaattcctaaagtggaagtggtgccatttaaatatctgcaacagccaaccgagccaaccaaaagagatgcgcctaaacgtgggctgattatgatcctgttcgcacttgcaggtttggtggggtctgtcggttttgtgttagttgatcatttcatgcgtgaacgcgagcgtgaagaagagatgctaaaactggcgaataccgataaagaataacgaaccaatactaattgatattttacattgccggattagcgctgcttgtccggtttttttttgataaaaattctgaggttagcattcatccttgttgtttgaccgcgttaaatcgacctcatacctttcccctaattatgtttccagcttgagcttatgctaaaatcctgttccttttcatcttcacactgccaatcaaaacaatgaaatttcctggtaaacgtaaatccaaacattattttccggttaatgcccgcgatccgttattacaacaaacgcaggttcaggctgaaaatgaggtcagcacctcttatatcgtcggtatcgaccaaaccctagtcgatattgaggccaaagttgatgagggatttattcagcgctacggtttgagccagggacattctttagttattgaagatgatgtggctgaggctctttatcaggagttaaccagcaacggtttgattacccatgagtttgcaggtggcaccatcggtaatacattgcataattactcggttctggctgatgaccgttctgttttacttggaactatgtgcagcaatataaagattggtagctatgcctatcgttatctgtgtaatacctcaagtcgtaccgatttaaattatttgcaggccgtggatggcgctattggccgctgttttaccttgattactgagaacggagagcggactttcgctatcagtcctggtcaaatgaatcagctacgcccagatagcattcctgaagaagtgattgcaggggcctccgctttagttctcactgcttatttagtacgttgtaaacccggtgagccaatgccagatgcaactatgcaggctatcgcgtacgctaaaaaatatcatgtgccagtggtgctgacgttgggtacaaaatacgtcattgcagataatcctcaatggtggcgagatttccttaaagaaaacgtctctattttagcgatgaatgaagatgaagcactggagcttacggggatcagcgatccattgatggccgcggatatggcgctggattgggtagatttggtgctatgtaccgccgggccaaatggcctttatatggctggctatacggaagaagcaggcaaacgccagactcaacatcctttactgccgggtactattgctgaattcaatatgtatgaatttagccgcgcaatgagaaaagagcattgtgatatgccattcaagatttactcacacatcgctccttatatgggtgggcctgagaaaattatgaatactaatggggcaggggatggggcattgtccgcagtgttacatgatatagcggccaacggttatcatcgtaataatgttcctaattcaagtaaacatgtgcgtagttacctgagctattcgtctttggcgcaggtttgtaaatatgctaatcgagtgagctatcaggtgttgaatcagcactctcctcgtctgacgcgcggtttacctgagcgagaggatagtctggaagagtcttactgggaacgttaatccaatcgctagacaacaaaaggccagcattgctggccttttgtattttaatttcggtctagtcagatcgggcaagctgcgcttttgacttcttcagtcaacgtatcgattttcagcatatttagcatgctgccggcaatctcgcgttcacccataacgacctgatcggcaccgcggtcggaaatataaaccacctcatcgtcataatgcgctctggcaataatctcaaggtctgggcgtttgaggcgcgctgcagcgacaatttcacccgcctcatagccatttggaatggttagtaacagccagcgtgcgcagtctagtcgagccaatgacatgatttctgcattggctgcgttgcccagcaccgcgttaattccttgctcacgcaaggcttcgactcgggttcgggagttttcgatgaccactaatggaacacccgctgcattgagttttgaaccgagcaggctacctacgcggccataaccgactaataaagcgtggttacatagatccactggaatttgtttttcttcttctactgcttcttccagaatttgatcttccatggtttcggttttaattagatagcgatccaacaggctaaatagcaatggattcagcatgatagaaagaatggcactggctaaaaccagattgcggccatgctccgacatcaaaccaagggagatccctaaacctgctaaaataaaggcaaactcaccgatttgcgccaaactgactgaaatagtcagtgcagtgcgtttagagtggccaaacatacgaactaacaagaaggctgcggcagatttaccgaagataatgatagccagtgaggcgataaccgctaaaggctcacgaaccagaatcatcgggtcgaatagcatgccgaccgaaacaaaaaacaggacggcaaaggcatcacgcagcggtaaagtatcctgagccgcgcggtggctaagttcggattcgtttaacaccataccggcaaagaaggcgcctagggcgaatgagacgtcaaacagccctacagcaccgtaagcgatacccagcgctaagaccagcacggccaaggtaaatagctctctggagccggtactggcggtttttgccaatatccatgggacgaggcggcggccaaccactatcatcaaggtgatgaaggcgatgactttaccaatagttatggccagttcggtgaataattggctcaaactggtattttcgctacccataacgccagcgaatgctggtaataacaccaatgttagtaccatcgccagatcttcaactatcagccagccaatggctatttgcccacgctggctgtcgatcaactgccgttcttccagtgctcgcagcaataccacggtactggcggtagacaagcaaagaccgaacaccaagcctgtgaccagatcccagcccagcatgctcgaaaggccgatacccaacaatgtggcaactgcgatttgcgctatggcaccgggaatggcaatggattttacagcgaggaggtctttaagagagaaatgcagcccaacaccgaacattaacaggataacaccgatttcagccagttctggcgctaatgacgtatcggcgacgaaacccggcgtgaatggcccggctaacacccctgcggcgagatatcccactaatggggagatgcgcaggcggtgtgccagtgtaccgaggaggaaggcgagaaccaggcctcctacaatcgttgtaatcaggggtgttgagtggtgcatccagactccttcttgttatgcgggcagtgttcattcacagcaatagcactagtttattgcatttgtgcgaactttacccgataaaaattcatattttgtcaatgaaactgaaggttggcctgtaaattgcgtaaggtggttatttatgagtgatatctcatttagacctaatagatataggtagttaagccagataatactgctatctcatccggcttaagttagtaatactgactacttttcttcaatattaggcagtaaggcagtaaatatgccaaggagtggcaggaatgcgcagatttggtaaactaactcgatactggttaaatcagcaacataaccaagtacagccgcacctaacccgcccataccgaaagctaaaccgaagaataatccggaaaccatgcctacctttccagggatcagctcttgggcataaaccagaatggcagaaaacgctgatgccagtatgacaccaatgatcactgtcaaaatgccaatccattgcagagatacgtagggtaaaataagggtaaatggtgcaacaccgaggatggagccccaaataacgtattttctcccgactctgtcccccaagggcccgccaatgatggtgcctgcggctacggcaaataagaatataaacagatgtatttgggcattttgtactgaaacaccaaacttatggattagatagaaggtgtagtagctacttatactagttaagtagaaatacttggaaaaaatcagtactagcagaatcgctaaagtggcaattatggtctttttaggcagtgtttgtaccggtgccgcttttatcggcttaccggcgaccgcgcgattttgcatttgataccatttactgacctgtaatagcactacaatggccagtaatgccgccagtgagaaccagccaacattccctttgccgtagggcgcgataaacatcgccgccagtaatgggcctaacgcactaccaaaattccctcccacctgaaacagcgattgcgccagcccgtgacgtccgccagacgccatgcgtgccacgcgggaagattcaggatgaaacacggaggaaccggtaccaaccagcgccgccgccagcaacaccaccggaaaagtagtcgcggcggccaataataagatgcccgaaagagtgaatcccataccaataggtagagaataaggctgtgggtgtttgtctgtgtagaggccaatcagcggttgcagcattgaggcagtcatctgataggtcaatgtaattaagccgatttgagtgaagctcaggctgaactctgcctgtaataaaggatagatagctaaaatcagcgattgaatcatatcgtttagtaaatgagagacgcttatcgcccctaaaatagaaaacgaagttcgctttaaggcatttcccttattttgggaggttggagggacgatgcgatcggtcatgatgagtatcagcctaattgtttttattgcgaaaggtagcgcggtaatggatacatattatgcatatcgtatgatttttactatatccaacattatttgacggatatcgcaaaaatgtgaaattcaggtgtatctaatcgagttacaatgcaaactgcatcgaggtatcaccttgattctcacagaaatcctgaactcttacgcgatctgtattcatcagactgacttttactcgacccgcttttggcgattacatggagatttgccatgcgtttttcattaaataccacagcatgcgcgttggccgtaacattggcctttgcccccggatgggccagcgcttgggaaaaagataaaacttacgacattactttactgcacactaacgatcatcacggccatttctggcaaaacgatcacggtgaatatggcctggcggcgcaaaaaaccttggtggataatattcgccaacaagtggcagcagaagggggcagcctattgttgctttccggcggagatattaataccggtgtacctgagtctgatttacaggatgcggaacccgattttcgcggtatgaatttagtgggatacgatgctatggcgatcggaaaccatgaatttgataacccgcttagcgtattacgtcagcaagaaaaatgggccactttcccgctgctctctgccaatatttatcagaagagtacccagcagcgcttatttaaaccttatgccctgtttgataagcaagggattaaaattgcggttattgggttaaccactgacgatacggctaaaattggcaatcctgagtatttcactgatattgaattccgtgtaccggcggtggaagccaaagaggtcgtcgaaaaactgcgtcaggatgaaaaaccggacattatcatcgcagccacccatatggggcattatgacaacggtaatcacggttctaatgcgccaggtgatgtagaaatggctcgtagcctgcctgcaggttatctggacatgattgtgggtggacattcgcaggatccggtttgtatgtccagcgagaatcataagcaggtagattacgttccgggtacggcttgcgcacccgatcgtcaaaatggaacctggatcgttcaggcgcatgaatggggtaaatacgtcgggcgtgcagattttaaattccgcaacggcgagctgacgttggttaactatcagctgattccggttaatctgaagaagaaagtagagaaagccgacggtaccagtgagcgcgttttctataccgaagagatcgctgaaaatccggcaatgctgaaattactcacgccgtttgaagataaaggcaaagcgcagctggaaattaaagtcggtagcgttaatggcaagctagagggcgatcgtagcaaagttcgcttccagcaaactaatatggcgcggatgctattagcggcgcaaatggagcgtgctggcgctgattttgccgtgatgagcggcggcggcgtacgtgactctatcgatgctggcgatattacttataaagatgtgctgaaagtgcagccattcggtaatacgctggtttatgtggatatgaagggcagtgaagttgagaagtatttggccgtcgtcgctaataaaaaagtggattcaggcgcctacgctcaattcgccaacgtcagcctggttgccgatggcacaggtgtcagtgatgttaaaattcaaggtaaaccgctggatgcgaataaaacctaccgcattgcaacgctgaatttcaacgcgctaggtggtgatggttatccgaaggtggatactttgccaagctacgttaataccggtttcatcgatgcggaagtcttgaagcaatatattgaaaaacactctccgctagatgctgcggcctatgagccgaagggtgagattgtttacaagtaatgagttgagttgagatgaggtgaaaataccttagggactttttatctgaacggggagtacgggtagcgctaatgcgtctatgcgtattccccatttttggctcagtggcattctgtggcagagagaagcgaggattaatcccgtttggctatatccgcgaataccgcattgagcaactggcctaaatctgctggagctagctctatatccagcccgcgtttgccgccggaaacgaacatagtggcatattgctgcgcctgactgtcgatgaccgtgggtaaacgttttttctgtcctaacgggctaattcctccgactaaataaccggttactcgctgcgccagctgtggatcggccatatctgcttttttcgctcctaaggctcgggcaactttttttaaatccaattgagtggcgaccggagtgacggcaacggctaagtttttggcttctccattcaggcaaaccagcagagttttataaacttgccgggcatctagccctaattttctgacagcttcatcaccaaaattcgtttctgcactgtcgtgttcgtaagggtgaagagtaaaggcgattttttgcttttccagcagaatgacggcaggagtcatgattttcgtccactataaaaataataccagttaatcataacaggactatcgttgcagctaatccttatctttttagtatcttacgcttaatgcagcttagtaagaaaaaaattaacttaatagaatcaaaattatgaaattgtattcctcaataataatgaatcccagttgcttataggatccgcgggttgctaccctgatatggcaaattggttgaccgtcaggaaagccggcttgctacgtaataactaaaacaatgaaaattcctctttgactggccaatagcgatattggccatttttttatccatgagctggctgcattaaagccggtaaatttccgtcgccatataaatgtaaagcgcccacagcaaccagataatgccccgccggtaaggcagacagttgtttttgccattgctggttacgttgcaccattaatagctcatataaatcatcgctaaaagtcgttgtcagtttagccaggctaccgcagggttgtcgctctaaccaccaactgatcatggtttgtaacatgcgggcgttggtgtgccagtgagccagagtatcttttaacagccccattccgctgtcaggcagggtttccagtagggaaagctgcatttgcgagccttcgagttcgataatatttttccgctgcgctttggctgcattcaataattggtaatcaataccgtattccccgcgcagccctagattttgcgcctgacgcgcctgtagcatcagcgcgatttgccaggccggaagggtggccagagcgaacgggtcggtttttaattcttcacagcgctgaacgagctgttggtaatctgtttcagagagtcggtcgaccaacgggagctcatcgggatagtgagcgaaaggggatccaccttgggtaatatcggcctcaacgattaacgcatcggcttttatcaggcgatccaacagaatatccggtagcgggaacatgccttcggttcccatatggatactccctaccagatggaagtgacgtgagccgggcagttgtaaatcgatacccggatacggataactcggcggagaaaggatgccaagaaaggtggctagctgacgtaaaagttgacccataccggtgtgcgtcctgatttagcatttctcccatgctaaacgctaaatggcgcacaagaaagggttgtgcgccactgggttaggacttcgtttattgtttaggtttaaaacgtaacaaacggttggcattactgacgacggtgattgaggacaacgccattgcagcccccgcgaccaccgggcttaacaacgttccggtgaacggatacaaaatacctgccgcgattggaatccccagcgcgttatagaaaaatgcgccgagcaggttttgtttcatattgcgtaatgtggctttggatagctctacggcatcggcaacgccgtgcagactatggcgcataagcgtaattgccgcagtttctatcgcaatatcgctgccgccgcccatagcaatacctacatcggcctgagccagcgcgggcgcatcgttaataccatctccgaccatcgcgactttgttacctgcagcctgtaactgcttaatcgcatcggctttgccatcgggcagcactccggcaatcacttgatcaataccggcctctttggcaatagcattagcagtaatcgggttatcacctgtcagcatcactaatttgtagccttgttgatgcagacgttgcaatgctgagacactatcgctgcgtaacggatctcggatggagaacagcgccgcgacttgaccattggccgccagaataaccggcgtggcacccgtttccgcctgttgccgcattaagtcgcttaactcaagggtatcaatctcttgttgtttcagtagtgcattgttccctaatagcagtgatgctccttcaacatcaccgctgacgcctaaaccgcgcagggtacggaactggctggtggcaggcagagtcaggcctttggcacgttgcaaaattgcctgcgctaacggatggtttgagcctgtttccagcgcagccgcccagccaagcgcctgttgttccgtaatcccgttaaaggtatggatagcgacaacctgcggacggccttcggtcaatgtaccggttttatcaaataccaacgtattcaagccgctggcctgctgaagcgcatcggcatctcgcaccagtacgccaaactcagcggcacgaccaacgccagaaatgatcgacatcggcgtggctaatcccagcgcgcaagggcaagcgatgatcagcaccgtggtggccaccaccaaggtatatacaatttggggctgagggccgaagaagtaccaaatcacaccggcaatcaaggcgatagccacgacggttggaacaaatactgcagagattctatcggctaactggccaatttccggcttactactttgcgcctgacgtactagcttgataatccgcgccagcgtagtctggctgccaatggcgttagcgcggaacagaaccgatccatcctgcactgaggttccggcgtgtactttatctccagcggatttctgctgcggaatcggttcgccggtgagcatggcttcgtccatccacacttccccctgcacaatttcgccgtcaacgggaactcggtcaccggtggtcaaacggagggtcattcccagctgtacgtcagccagcgggatttgtttctcaccgtcctcagtcacaacccgcgcggttggcggtgccagatccagcaaacgttccaacgcattggacgaacgttgtctggcgcgctgttccatcgcatgtcccagattgattaaaccgataatcatggcgctggcttcgtaataaagatgccgggcctccatcgggaatacatcgggccagatattgacggtaatcgagtaaatccaggcggcaccggtgcctaatgccaccagcgtatccatagtggcgctgccgtttttcaggctgacccaagcgttgcgatagaaatgtccgccggcaaagatcatgaccaacagcgtcaatacaccgatcaccagccacggggtttgggtttccggcgtgagcgtcatactgccgccgaataagccccatgccatcaatggaatacctaataatagccccagcgcggcctgccattggaaacgtttcatattggcctgagacatttcctgctggcgttcccgccgtttagcttcgtcttcgataatctcagcgccatagcccgctttttctactgcggcgatcagcgcgctattatccggagaaccggtcaccagtgcgctacgttcagctagattcactcgcgcgatctgcacgccatccacgctttgcaacgctttttgtactttagaaacgcagctggcgcagctcatcccggttaacaatagctgcacgctatccggatcgtcgccgtctgacggagcggttgcgggagtattttcagttgccggaagagaagaggccgctgccaaagattccggcgcagattgcgtagcatgtgccagcggctcagtttttgggacggcgttttcctgcgccagcgtggcctgataaccggcattttccacggcggcaatcagtgcgtttgcgtcgactcgaccgtaaactttggcgttggaggtggatacatcggcggcgatgactcccggaacggcttccagcgcttgacgtgtcgttgccgcacagtgcatacaggttaagccggaaagctgtagctctacgtccggttgttgtactggctccgactgatagcctgcctgttttaccgtttcgatcagtgcctgtatgtcggcctcaccgaccactttcgcatagtgaacgttaacctgagcctgttcgacgtcaggccggtcttccagcgctttttgcacccgtccggcacatttcatgcaggttaaaccctgcaaagcaagcagcgtagtgtgtgacatgattaactccttaaagagtaaaaacttatccttttgactgcggggataagtttagtcggtattaagccctttaccttgatgccgatcttctggcaggcaacaaggttaatttctcttgaccgacgtgactattttaactacttatggaggttaaaccttccagcaagggtaaggtcaagggagaaatatgaatatcagcgatgtggccaaaaagaccggtttgaccagcaaagcgattcgcttttacgaagaaaaaaagcttgtaactccgcctatccgtaccgataacggttatcgcagctatgatgcccgtcatattgaagaattgactttgctgcgacaggcgcgccaggtgggatttactctggatgaatgtcgtgaattattggcgctgttccataatccggatcgccatagtgcggacgtcaaagccgcgacgttacagaaagtggctgaaatagaacggcatattcaggatttgaatcagatgcgtttacgcttactggcgctagcggcagaatgccccggcgacgagggggcggattgcccgattatcaataatctggcgggttgttgtcaccgcgaggagaaaggatagagataagaagcccacggtcgcaaaccgaacgtgggcgataaactagcgtattattgcacggacattcaaggtgttaccttcaatggagaccacttcgacttccgtgcccacgcttaattcttcagaactatggatacgccagctgctgtcgccgactttcatccgaccatagccatccagtgtcggttccgtcagcgttgcccgcaggccaaccatttgatgatcccgctggttaagcatggcaggctgcggtttgactcgtttactcagccaataccaccacaaaatggcggcgatgacggtgagaacggcaaagagtacgccttgccattcccagcttaacggcaacatccagaccaacaggccaaccagtacagcggcaattccactccataacagataaccgctggcacccaacatttccgcggctaataacaagccgccgagtgatagccaaaaccaatttgggtttgctgcaatctgtttaagcatggttatttacctcggctggttttgctctcgccaatcagttcagcgataccgccaatcgcgcccatcaggctgctggcatccagtggcatcatcacgactttactgttgttggctgagccgatgtgttgcagcgcatcggtgtatttctgcgccacaaagtagttaatcgcctgaatatcaccggcggcgatagcttcagaaaccattttagttgcctgagcttcggcttctgcggcacgttcacgggcttctgcttgcaggaaggcggattgacgttccccctcggctttcagaatctgagattgtttttcaccttctgcacgcagaattgctgcctgacgcacgccttcggcttccaaaatatccgcacgcttggttcgctcggctttcatctgggcgttcatggccgaaattagttcggtcggcggacgtacatcgcggatttcaatacgggtaattttgatgccccaagggttggtggcttcatcaacaatatggagtaaacggctgttgatgttatcgcgctgggacagcatttcatccaattccatagagccaagcacggtacggaagttggtcatggtcaggttaacaatcgccagttccaggttgctgacctcataagccgctttgaccgggtcaataacctgaataaagcagactgcatcaatggcaacgttggcgttatcgcgggaaatgatttcctgtgaaggaatatccagaacttgttccatcatgttgattttacggccaatgcggtccataaacgggacgacgatgttcaggcccggcatcagagttttggtatagcggccaaagcgctcaaccgtccactggaaaccctgtgggacaattttgattgcggagaacaccacaaccagcgcaacgacgataataatcgggataaccgtaaacatagttaacttcctgtcggtcaatgaatattgtttcataatattacgcgacgacaggctaaaagactaactaaagggaggtaaatacatgtaaggaatcattctgctatcgaaaaagcagaaaaaaacctgaaaagtgaataagaaagggcgcgggaaagatcccgcgcagagtagctaaaatgggcttagtacagcagagagtagagctggcggcggtatttaccggccagagtatcgccggtgccaagggcggccagaatatccatcaaggttttgcgagcgttgccgttcgctgctgccagatcttttttcagatggctcatcaacagttccagtgcttcttcgttacggccaacctgatgcagttgcagtgctagctgtaccgccagctcgacgttttcaggctgctcggccagctgttgctgtaattgctgaatttccggcgtatctgccgcctgcttgagtaattctatctgtgcaatcaggccctgatagcgagtgtcccgatcttgcagtgggatagtttctaataccgcttccgcatcgtcactacgattcagttgaatttgtacttcagccagctgcaagccgatttcgccgttgtattggctaagctgccaggcatctttcagtagcggaagggcttcttgcgctttgccatcggcgataagctgcgccgcttctgctgcttttagttcttccggtttaggtaatacgcgttgtaacagttcgcggataacttcttccggttgaggtccctggaagccgtcaaccggctggccgtctttaaacagatagaccgcaggaatagaccgcaggccgaattgtgaggcaaccatttgttgagcgtcacaatctactttggccagaatgaactgaccggcgtattcggcggctaatttgtctaaaaccggcgttaattgcaggcagtgctggctacgttccgaccagaaatagaacagaaccggctgcgccatggactgttccagggtttgatgtaggttagcttcggtaatatcgataactgttggtgctagcatgactttattctctcatccgttttagcgatagatgggggcagaatatccggcttcaaccctctatcgcggtttatcggttatcaggcgttgccccgcaagacgcaatccagcaagcggcccggtaaaatgcgacgcagcacggtaacagcgtgtgccaccagtgtgaccggatagcgcaactttggccgcggcgcttctaatgcatgacgtaatttgggcaaaatcgcttcaggtggcagggtgaagcgtttggcgatacccggattattcactggtttgtcagcctgggtctgattaacgttttgtgtgaaatgagtgctaatcggccccggttcaatcaaactgacaaaaatcccgctgccgtttagctccatccgtaaggcatctgaccaggcttccagcgcatatttgctggcggcgtaagcgccccgacccggcgttgaaatcaaccccatcaccgaactggtttgaataatccggccttcgccgtggggcaacatggcaggcagcagtaattgggtgagttggtgggtgccaaatagattggtggaaaactgccgttccatttgttggcgcgaaatggtgtctagcgggccgtataagccatagccgccgttgttgaataaaccgtacagtcgcccgccggttagctcgataacctgtgccgcggcgcgctcgacgctggtgctgtcatccagatccagctcaataccttccagccccaattgggacatgttttctacgtcctcaggtttccgacaggcagccaaaacccgatagcctctgttacgcagatcctgcgccgctaccaaaccaattccgctcgagcatccggtgattaaaaccgctttttgcataactttacctactgaatgaacctatttgctcagactaatggtttactaagaacttatattatcagatagctaatatcttatattaataagtgcagcgttattctgacttgcctttttggataaaaggcgtgagttgctttgacatccagtcggcaataaacggctgcgcctcggcgttaggatgcaagctatcgtcctgcatccattcaggttttaccgctacctgctccataaagaaaggcagtagcggaatttcggcctgctgtgccaatgtcggatacagtgcggcgaatgactcggtatagcggcgaccataattaggtggaatgcggatttgcattaacaatggttgtgcctcggcctctttaaccagactgatgatttgcgccaaatcccgctgaatatcctgcgggggaaatccgcgcagcccgtcattggcacctaattcaatcaatacccagcggggctgatgttgtgccaacagtgcgggaagccttgccaggccttgcgcggcggtgtcgccactgatactggcgttgacgactttaggatgagcaggcagcgtttgccattgcttgtccagacgggtagcccaggcttcggcaatgggtaggcgataaccggcgcttaaactgtcgcccaaaatcaataatgtatcgtttgcagtagcgcgcagactgaataatcccaacagtagaaggaagggaagatgccagcggaaaacgttcttgaagttcatcatcttaataaacacgttggtcagggtgagcatcagctttccatccttactggagttgagctggttgtcaaacccgcacagacaattgccctgattggtgagtctggctccggtaaatcgaccctgctagggattctggcaggtttggatgatggcagcagcggcgaagtcagcctgttggggcagtctttgacagcaatggatgaggaagggcgcgcgcaagtacgggcgaaaaacgtcggatttgttttccagtcatttatgctagtgccaacgctgaacacgctggaaaacgttcagttgcctgcgttattgcgtggggaaagcgatcgtcagagcaaagctcaagccacggaattattgcagcaattggggctgggggaacgtctgcatcatctgcctgctcagctttccggtggagaacagcaacgcgtcgcactggctcgggcatttagcggtcgcccgcgggtattgtttgccgatgaacccacgggaaatctggatcgtcaaaccggcgaccgcatcgccgatctgttgttttctctgaatcgagattacgacaccacgctgattctggtcacgcatgatgaacaactggcggcgcgctgccagcggcgtttgcgcttgcgggatggcaagctgtgggaggaagcatgatttggcgttggttttggcgggaatggcgctcgccatccttattaattgtctggttagcgttgactctggccgtcgcctgcgtattggcgttgggcagcatcagcgaccgaatggagaagggcctcagccagcaaagccgtgattttctggcgggtgatcgggtattgagcgcttctcgtccggtatcagagggatggttgttagatgcggaacagcaagggctaactctcagtcgccaactgtcgtttaccaccatgacttacgccggtgatagaccgcaattggcggatgtaaaagctactgacagcgcttatccgttgtacggaacgctgaaaacccggccggagaatgcgcggctggaaccgggcaccgtgttggtggctccgcggctgctaactttattgggtgttaacgttggcgataggctggaggtgggggatgcgtcgctgcgtattgtcggggaagtgctggaggaaccagacgccggattcaatcctttccagactgcgccgcgcattctgattaatctggccgatgtggaaaaaaccggcgcagtgcagccgggtagccgtttgacctatcgctatatgtttgccggctcgccggataacattcagcgcttcggcgatcagataaaaccggaattacagcccgatcaacgctggtacggtttgcaggaatcgggtggcgcactggggaaatccttgcagcgctcgcagcaatttttactgttatcggcgttgctgacgctgttactttccattgccgccgttgcggtcgccatggggcattattgccgtagccgctatgatttggtggcggtgctgaaaacgttgggggcgggcaaggccgcgctgagaaagctgattgtcggccaatggatatcggtactgacgctggcggcattgtgcggtagcgcgatagggctgctatttgaacgactgctgatttccatgttggcgccagtgctgcctgctgcattacccgccgccggactctggccgtggctgtggtccatcggctccctgattctgatttccctgctggtgggattgcgcccctatcgtcagttattagcgactcagccgttacgagtgttgcgccgggatgtggcggcaaatgtctggccgctgcgctatttcatcccgttaatgttattagcggtgatcggagttctggcgctgttaatgggcggcaataccttgctgtgggcgattttgggcggcttgctggtgctgtcactgttattgggctgtatcggctggggcagcctattattgctgcgtcgactgacggtgacgcgcttgccactgcgtttggcgatcaatcgtctactgcgtcagccttggatgacattgacccaactggcagcattttcgctgtcgtttatgttgctggcgctgctattggtcctgcgcggtgatctgctggatcgctggcagcagcaattaccgccggacagccccaactatttcctgttgaatatgaccaaggagcaggtgccgcaggtcagtactttcctcaatcaacaccagattatgccaaccacgttctatccgattgtgcgggtgcgcatgacggaaattaaccagcagcaagcgaccgagcgggtgcatgaaaacgatccgggaggagaggcggtcaaccgggagcttaatctgacctggttaccggatttaccggctcataatcagttaactgacgggaagtggccgccaaaagcggatgaagtatcgatggagcagggcgtagccgagcggcttggtatcaagctgggcgacaccttaaccttcagcggcgatacgcagtcgttttcggccaaagtgagcagtattcgcaaagtagattgggaaagtttgcggcctaacttctactttattttcccgccgggagccttggataaacagccgcaaacctggctaaccagcttccgttataacggtaacgagcagttattgactcaattgaaccgccagttccctacgttaagcctgctggatataggctcgatgttgaaacaggtcggtcaggtattgcagcaggtgagtcgggcgttggaagttatggtggtgctggtcatgatctgtggcactttgctgttattagcgcaggtgcaggtgggaatgcgccagcggcgccaggaactgatggtttatcggactttaggcgcggggaagcgcttgctatgggggacgttatggtgcgaatttgccctgctagggctggtggcgggcatggccgccgctataggtgccgaagcttcactgtgggcgttgcaacggctggtatttgatttcccgtggcagcctaattggatattgtggtggatgttgccgttgcttggcgcactgttattgtctttatgtggcagttggctgggcgctcgtctgctgcgcggaaaggctttgttccgcagctacgaaggttaacaaccaaggctaaatatcggttatcagcattggttagatgataaagaaaagggcagccattggctgccctgattctactaactgactctgcgataaaaccgaggcgtttatggcatctccgttattgcttatcccagttttttctgcgcccagcgcagggcgctttgatattcatttggtagcaagggtgacaactcgttcaacgtttcggccaattgtttttccgccggatcggtgagattcaaatgcccgactttacgcccatcgcgcacttctttttcgtaccaatgcagatgaaccagaggctgtgaaagccatgccaaattaaccgcagtgccgatgagattcaccatgaccgaaggggtgctaaccaccggttttggcagtggtaaatccagaatagcgcgcagatgcaattcgaactggctgatggacgcgccattttgcgtccagtgaccgctgttgtgtacgcggggagccagttcgttgatcagcaggttgtcgccgacgataaagcattccatcgccatcacgccgacataacccagctcattcataatggcggacaacatgctttctgcctgagcctgcaatttggcatctggctgcggtaacgctacgctgatacgtaaaatgccgtcttcatgcagattatgggttagcggataaaataccgtttccccatcatggctacgtgcgccaatcagagaaacttcgccagaaaaatgaatgccttgctcgacgatgcactcaccgtaggcgtccgcaggcaggctatcttgctcgccgggacgtaaacgccactgcccacgtccgtcataaccgccgacgcgacgtttaacaatcgccagctcacccagagaagcaaacacctgcggccactgttcggcattagcgagtaattgccaaggcgcggtggctaaattcaggctatccaacaattgcttttgcgtcaggcgatcggccaaacgcgggaaaatatctcggttaacgaaggcgttgtgagtagccaattcgcgggtcagtgcggtttccggccagcgctcaatttcagcggtaatcacactattctgataaggcacggcttcgggttctgcgtccaatcctactggataaacggcgattcccagcggctctccggcctgacgcagcatgcgccccaactgcccgttacctaatacgcaaaccggcttcatgcatcctcccgcggatcgggattattcagcacttcatcagtttggttttgacgccacgcagccagacgccctgcgagagttttatcgtgcagcgctaaaatctgtgctgccagcagcgccgcgttggctgcgcctgctttgccaatcgccagcgtccccacagggataccgcgcggcatttgcacaatggaataaaggctgtctacgccgctcagcgctgcgctttgtaccggcacgcccagcaccggcaccagcgttttcgccgccagcatacccggaaggtgcgctgcgccaccggcaccggcaatgatcacatccagtccattagcgtctgcctgttcggcaaaactgaataatttatccggggtacgatgagcggaaaccacttccacatggaaagggacatccaattcggtgagcacgtcagcagcgaactgcagggtggcccagtcacttttagaccccataactattgcgattttaaccccggctgtgatagccgaatcgaggttggctcccatgggtgtaaagctcctgtgattgtgcaaacgtcggccagagcgaattgtgtctggcgaagagggcgtagagcataccatgagccacaggcaaggaaaacggttgcgtagctggtttttgtacgaaaaagcaggatttttcaggatttggcagtaaggtttaaaacgggaattcgatcagctcgatagcttcaggagtgacgcaaatcatcgatccttccacatgccaggcacccaatacggcgcgatgtacggttttatctgccagtttaaggggatgaatcgctggacgatgtgtatgaccgtgaatcatccactccacgccattgcgttggaaagcatcaatcacagctgcgttattcacatccataatggcttcggatttgtctttattattctgttggctgtttttccgcatcgaagcggcaatgcgtaaacgccaggaaagaggtaaggacaggaataaccattggataatgggattgtgaacccggcgacgaaaatgctgataatccgcatcatctgtgcataacgtatcgccatgcaggattaaaattttgcgaccatacagttcgagagtttgttcttctggcagcagcatcataccgctttcggcagcaaaacgttttccaactaaaaaatcacggttgccgtgaatgaagtagcagggaattccccgatggtgcaagtctttcagggcactggcgacctgacgatacagcggcagcggatcgtcatcaccaatccacgcttcaaatagatcgcctaggatatataaagcgttggcgtgaatggcttcgcgctgtaaaaaacgcagaaaaccggcagtaattgccggttcctgaacgctaagatgcaaatctgctataaaaagcgtgcgcattccgtcgcaattactcgctaacggtaacgcttttgatgatcacatcttcttttggaacgtcctgatgcatgccgctacggccggttgcaacgcttttgattttatcaacaacgtccataccttcgaccacttcagcgaatacgcagtagccccagccgtcagcgcgctctgaacggaagttcaggaagtcgttgtcagctacgttaatgaagaattgagcggtagcagagtgcggatcgttagtccgcgccattgccaaagtaccacgggtgtttttcaggccgttgttcgcttcgttcttgatttgcgcacctgtttctttctggttcatgccaggctcaaaaccgccgccctgaatcatgaaaccatcgataacacggtggaaaatagtgttgtcgtagaaacctttacggcagtaattcaggaagttttcaacggtagccggcgctttgtcagcgaaagtattgatgacgatgtcgccgtgattagtatgaaaagtaaccataataatattcctgctagtgtaatatgtggaatcacaaagtgagtcgctactctttagacggctcttataacacatctgccggattgagtcagtattcgcgcctttccaacccgctctggccaggagaggcagaaaagcattagtggggcaatgtggctgattaataaagctatttataacccaataaattcaccgctttcatccgcgctttttatcatcacctttaaacgtcaaaccgcttaaaattgcgttattcagtaggttttaccgatggctgaccttgcaatgcaataaggatcgcgtttcaatatatccttgggttatttaagcgcccatttttggtaatatcctgtttatattcacgcgtacgcgcctagcaaaaaaccacggaatgtcccgatgctaaagatttttaatacactgagtcgccaaaaagaggaattcaagcctattcatgccgggaaagttggcatgtacgtgtgcgggatcaccatctatgacctgtgtcacattgggcatggtcgtacttttgttgccttcgatgttgttgcgcgttatctgcgttatttaggctattctctgacttatgtccggaatgtcaccgacgttgacgacaaaatcattaaacgcgcggcagaaaataatgaaacctgcgatcagctgacttcccgcatgttggctgaaatgcataaagattttgatgcgctgaaccttcagcgcccggatttggagccgcgagccactcaccatatcactgaaatcattgaactggcgcagcgcctgatcgagcgtgaccatgcctacgtagcgtcaaacggcgatgtgatgttcgcggtagatagcgatccggattacggtttgttgtctcgtcaggatttggaacagcttcaggctggcgcacgggtcgaaattgccgatgtgaaacgtaatccaatggatttcgtgctgtggaaaatgtccaagccgggtgagccaagctgggaatcaccttgggggccggggcgtccgggctggcacattgaatgttccgcgatgaacggcaagcagttgggcgcgcattttgatattcacggcggcggttctgatctgatgttcccgcaccatgaaaatgaaattgctcagtctacctgcgcccatgatggcccttacgtcaactactggatgcattccggtatggtgatgatcgacaaagaaaaaatgtcgaaatcgttgaacaacttcttcactattcgcgatgttttggcgtattacgatgcggaaaccgtgcgctacttcctgatgtctggacactatcgcagccaattgaactacagcgaagaaaatctgaaacaggctcgcgcctctctggagcgtttgtacaccgctttgcgtggcaccgatgcaaacgctacgccagccggcggagctgagtttgaagcccgtttccgtgaagctatggacgatgattttaatacaccggaagcctattctgttctgtttgatatagctcgtgaagtcaatcgtctgaaagcggaagatatggcagcggccaacggcttggcggcagagctacgcaaactggcgcacgttctcggattattggagcaagatccggagcaattcctgcaaagtggcgcacaggctgatgatgatgaagtgaccaaaattgaagcgctgattaaacaacggaacgatgctcgtgccagtaaagactgggcaatggcagattcagctcgcgatcagctcaacgaaatgggtatcgtgctggaagatgggccgcagggcaccagttggcgtcgtaagtagcagataagtggttttgatttgatgtaaacggtgggttcccatctttgaagatgtggaatcttgctgaataaccttgagtggcggtaataaaaatatcaaagaaaacattgcggtgctgatagctatcagtaaccgcaatgctctttatgaagcttaggctttaacctgtacggtcatcccctgaaactccacgatttggtctgccagaattttgcagcgcttgcgcgtttctacttttccgtcaactttgaccagaccatcggcaatcaccatttttgctgatgcgccgctgtcgttccacccttgaaacttcagcagatcgcacagttcaacatgagggtgattttccaactgaaaaatttccatgactatcctttaaatcaatttgtgttgatgtcgtgatattcctcgcaggcttgcaaggtattttgaatcagagttgctacggtcattggcccgacaccgccgggaaccggagtgatccagccagcgcgttcaacggcaacatcaaactctacgtcacccactactttaccactttccagacggttgataccgacatcaatgacgattgcgcccggtttaatccagtcacccggaataaagcccggtttaccgaccgcaaccaccagcaaatcggcacgttcgacgtgtgaacgcagatcctgagtaaagcggtgagtgacggtagtggtacagcccgccagcagtagctccaggctcataggacgaccgacgatgttggatgcgccaactacaacggcattcaggccgtaggtgttgatgccgctacgctcaagcagagtaacgatgccgcgtggcgtacaagggcggagttttggcgcacgctggcacaggcggcctacgttgtaaggatggaatccgtccacgtccttatcaggattaatgcgttccagtacttttacgttgtcgataccggcaggcaacggcaattgaaccaaaatgccgtcaatctctggatcttggttcagcttatcaatcaaagccagcagttcggcttctgaagtgctggcgggcatatcgtatgaacgagaaaggaatcccacttcttcacaggctttgcgcttactgccgacataaatctgtgaggccgggttttcaccaaccaacactaccgcaaggcctggggcgcgtttacctgccgccaaacgctgttgaaccagtgcagcaacttcagttctaacttgctgcgcaatcgttttaccgtcaataatttttgctgacatcagtggaggagtccatcaattaaaaaagcgggaatccctctattttgtcagaagcgaggcgtgctgtcaggcgtagaataacgaataaatgtacaggtgagtggttgtaaggcgaaaacccattgactcgcgggtgtctgcccgtataatccaactccgcaactgaccatccgcagcaagtattctgtggaaaatcaacaacgcgcccttagctcagttggatagagcaacggccttctaagccgtaggtcacaggttcgagccctgtagggcgtaccattttcaagtcaatgcacctctactgaattcgcttcttctcctttatactccctgaaattaatggatttttctgtcccgagctctaccgaggtcaactcagttatacccaaatcaagtggtatctgggggcctttgagggggctcatcgtaatggtctaatcattccggacactttgttagagatataatgagcaacactaacgaggtgagaatgcgaaaaaaatcatttactcatgagtttaaacaagagtgcgtcaatctggttcttcaacataagtacccggtgaatcagcctgccgaaacaatgaatattggcctttcaacctttcaaccttacaacctttcaaccttacaaccttacaacctttcaaccttacaacgctggctaaggcagtatcgcggagagatccgcggaaacacaccgatagccagtgctataacaccggaacaacagcgaatacaagaacttgaaaagcaggtacggcagttgcagagcgacaatgacctgttaaaaaaggcttcggccttctgtaagtatcccagctttagttccacacactttttgagatttccggtttctcagccatcagccgatattcttccggcgtcagattattcagggattcatgaggccgctcactgttgtattcattcagccagcgctccgttatttcccgtgcttcattcagtgttctgaacagataaaaatccagtatttcggtccggtacgttcggttaaaccgttcgataaacgcgttctgtgttggtttgccgggcttgataaattccagcatcacgccatggtcttcagcccattgtgccagcgccagtgatatcaattccggcccgttatccatccgcatcttcagcggatagccacggtttgccgctattctgtccagcacccgcacaatgcgctgcgccggaatattcaggtcaatttcgatagccagagcctcgcggttaaaatcatccacgacgttgaaagtccgaaaacgtcggccacatgtcagcgcgtcgtgcataaaatcaatcgaccagctttggttgagggcttccggcgtggccagcggcgccggattacgcaccggcaggcgttgtttccctttacgacgaaaattcagttttagcagacagtaaatccggtgtatgcgtttgtggttccaggcgtatccctgcctgcgaagcacctgaaaaagcttcttaaatccatagcggggatagcgttcagccgcctcagtcagcctctggatcaccggttcatcacgtcgtgtattcggttgataacgaaacaccgtcctgctcagcgataacgtcctgcatgcctgrcgtatgctcatcgtaaactgcgtggtcagatagttgacgagctcacgctttatcgctggttttaaagctttttttcgatgacgtctttcagcgcacggcattccagactcaggtcggcaaacatctgcttcagacggcgattctcgtcttctagatctttgatttttttgatatcagcggcttccatcccgccatatttcgccttccaattgtaatagctggcttcggaaatagcagcctcgcggcacacatctttgacggtcctacccgcttcgacggacttcagtacggcgatgatctggtgctcggtaaatcggatcttgcgcataaggatctcctcaggtgacatcatcagtatgtcggaagatctctaaaagtgaatgggccgtttaagcgggatacttacacttcttcgccatggaaatgaacaacgacaaaaagtcgcggtgaaactgaagaaggccggcgcaaacatccaacaggtatgccgctgcttatcgctcacgcgcagcgtgttttatgcccgtagtcgtcggccagtgatcaagcccgatgttctgatgttgcacgcggcggctaagcatgttcacactgaaatggatgccacatatggcagccggcgcatatgcatcgagttacgggagcagggttttaacgtgggcagataccgcgttcggcagataatgaaaaccttattactgattgctaaatgccccgggcgtcatcgctattcacgcggcgaaaaatccgctgtcgtggctgctaatctgttgaaccggcagtgtaatccagaaacattgaatacttggtggtcaggtgatatcacctatctgcgtaccgctcagggttggttatattgggctatcgtgatggacctatgttcaagaaaaatagtgagttggcccttctcagacaagccggacagcgacttgactgttcgggccttaaggctggcggtcaataaacgacgacccacagggtctgtggtgctctatagcgttcaaagggcacaatataccagcgcccagttccagtgctgtcaacaggaactggatgttacaggtacccctgaccacactcaacgccaacaaaccagaagaagaaaggatgactatcaggcagagcaagtatctgaataacctaatggagtaggatcaccggaatatcaaacgccgaacacggccgatgctgggatttaaatcatttcggcgggcgcagaggcatcgagttggtacagatgatacgtaaagagcaacttcagcatcccgcgggtgcgcatttatcaccggcggaataattttatttgttggcagcctaaaatatcggcagcgcaacttttgctgactctgctctgttaatgctacagaaccttttttaccagcaatgcctgaagcatggctcatggggtagcgtctgattgttgttacccccaatcactttgaaccctgattcgttcagtgttctcatcagataatcctagaaatgtactaactcctcatgatgcgtgagccagcactgctggtcagggcagagcgtctggtggctgcgggcatatccgggaagggaatgaagtcgccataggtgttacgccacagaacaccgtcttccacctgccgcagttcactctcccagaacaggctccagcctcgccccaacacatcaatttcagttgcggtgttggggggcatatttagcgcttaaataatgggatgaagtgtggggattgctcactatggtaatgcgaatgagttttaataatggtatatcttataattagaaaatctttaggtttctttacaaataaataaaaacgcgatcgagatcaaatacttggaacaccaaaaatatcatctttgtgttatcaatttaacgcagggtgttatatgaaaattaaagacttttttgttatgaccacgccttcaagacgtcgatatggtgtcgctttctttgttggtattattgctggcataatgtcagcttttgtaaagtggggcgcagaggtcccgttgccacctcgtacattctccggcggacgagacgaatttaatcccccttatttatttctgagagattatctcggtattgacccaactcaggctgtctatcatttctctgagcacatcattaatccggtgcatgtaactcatatcattttctctctggtttttgcgatcggttattgtttggtcgccgaagtctttcctaaagttaaattatggcagggggtaatggcgggtattattgcaacggttgccgtgcactggattagtttccctctattgggattaactccaccgctatcaggtctaccttttgatgaatatctctcagaattagttgggcatattttctggttctgggctattgaaatgatccgccgtgatttaagaaaccggataacccatgagcctgatgcggaagtaccgctcgattcacctttccgctaaatgttgctcgaggatcttaacccacactttgttgtgggtttttttacgccttgaaattgtccggtataaacgatcgtctacgggtacacatgcataattccattgtattggataagatttttattagaagaggtttaaagcatgaattctagggaggaaaagacggttaaagctgaggcgttggggagatcggctacgttgcaggacgaaagcaacttccgtcctgcattgaaacttaaatatatattaagcttcgattggcgcacgccagtcgtcagcacctgaagtgccagcggtagtgtgttcccagttgattttacgatatgacagagatacgcgcactaattgagtaaactcggttttagtgctgtcttggcaatgtggcattttgcaatcgatatcaataatagtggcatcttctaattcagttgtgaagaagtgctcttgtttaccttccacagaagtgcggtaccattttaattctactttaggcaacatttcacctgaagccagtgcgttataaagcaaaggaacagccttgtttaatgcaactgtaaaacggaatggtttatgagcacgttgaccggacggctgtccagattgtggatctgtaggcacggtaacaacgtgttcaaattcctgtaccagcatttcatcttcatgaccctgtacaaatatattaccaacagattcagcagtgaatgaacctgctgtaatgttgccttgtgtcttaccggtaatggagatatagcatggagttggcattgagaatatcctataaaagtgagttggtattgaaccctaaatgacgctaataacctgtaattgaatattccaggtgccggttattgcattgtatacacagagcaagaccttatcgtcgacgccactataatcagccaaaagcaaatctccaaacctcacaatgaggatagttaattagtaaaaacaccattagtttaaaaaattaaaataattgcaaaatcagaataatcatctttatggtctatttttttagatctaattttgtgcgaacttatttattcaaaaaaataaataatttacaactcattgttattgatgttttttgtaaattaaatttaaaaaaatatttgatcatgtgtgtattgagacgaacttcaaataaataatgatggatagttacctagttattttttctatggactttttgcggtgaaataagggaaaatcccttggagatgcattttttcccaatcatttaattaatttttgcatcatgtggaaataacctgcctgacccgatcagcgctgagattaaggaatatccaagaaaattttggttaagtattcctgtgcgtcgcattgactcatcttgagaaaaataagttatttcttaaattcttaggataattcttggatttataaccgaaaggtaatgtggatatgagtaaggataattcgagtagtgtcgctcctaaggaaaggatcaacattaaatatgtcccgaataccggtgaccaggttgcggaagttgaattaccgttaaatctgatggtagtcggcgatctgaaaggggttagagaagatacgccaattgaagaacggcaggttgtttctattaacaaaaataacttcaattccgtaatgaatgaagctgggattaatcttacttttaacgttccgaatcgtttagatggtaacggcgaagaagatatgccggtgacattgcctattaattcacttagcgatttctcgccggataatgtggccaagaaagttcctgaactgaataagttattagaactgcgtgaagcattagtggcgttaaaaggcccgcttggaaacatccctgcattccgttcacgtctgcaagacttgctttctaatcaaagcgtccgtgaacagcttctgaaagagctggaaatacttaaccaaaagtaattggtctggatacaaggaattttaagtatgtctgtacatgaagagaacgcagccacgcttgcaccggcagcgagtaccacttccttgcttgatgagattatgtctcaagcacgcatggcaccggaaaacgacggttatgatattgcgaaacagggcgtggcggcatttatctccagtattcttgataccggcgttaatgaagagccaatcaataagctgttagtggataaaatgatcgttgagctggataagaaactcagcgctcaaatggatgaaattcttcacgcagaagcattccgtgagctggaagcctcgtggcgcgcgctgaaactgttggtggatcgcactgatttccgtgaaaacatcaaaatcaatattatgcatgcgaccaaagatgagttgctggaagattttgaattttcaccagagattgttcaatccggtttctataagcatgtttactcttcaggttatggtcagttcggtggggaacctaccgctgcggtaatcggtaactatgcgttcagcaattcttcccctgatatgaagctgttgcagtacgtcagtgccgtgggcgctatggctcatgcgccattcctgtcgtctgtggctcccgatttcttcggtgtaagtagttttaccgagctgccgggtattaaagatctgaaatccgtatttgaaggcccggctcacaccaaatggcgtgcgctgcgtgagtccgaagactctcgctatcttggcctgacaacaccgcgtttcctgctgcgtctgccgtattcaaccgttgaaaacccgattaaaaacttcaactaccacgaagatgtcagtaaaaatcacgagcatttcctgtggggcaacaccgcttatttgctggcatcttgcctgacagatagctttgccaaatatcgctggtgtccgaatattatcggcccacaaagcggcggcgcagtgaaagatttgccagtgcatctgtacgaagcaatgggtcagattcaggcaaaaattcctaccgaaattctgattaccgatcgccgggaatttgaactggcagaagaaggttttattacgctaaccatgcgtaaaggcagcgataacgccgcgttcttctctgctaactcagtgcagaaaccaaagaactatccaaatacccgcgaaggaaaaatggcagaaaccaactacaagttggggacccaattgccatacatgttcattatcaaccgcttggcgcactacattaaagtgcttcagcgcgagcagatagggtcatggaaagagcgtcaggatctggagcgtgaactgaatatctggttgaaacagtacatcgccgatcaggaaaacccaccgactgatgttcgtagccgtcgcccgctgcgttccgctcaaatccaggtcttggatgttgaaggggatccaggctggtatcaggttgcgatgtcagtgcgccctcacttcaagtatatgggggcaagttttgagctgtcattggtaggccgtctggataaggaataatccgacatggcagcgctgttaagttgggagcgaggaagctcctccagcttgtttgagcgtatacagggggaaggctccggcctttcccgtcgtgcgcgggcagacgatttgctggtctcaataaaaggacatttgaacaaagtcctcaatgcccgccccggtggttgccagagttcggtagagctaggcgttattgatctcaatgatgctacctcaacggcaacggattttcggcgcagcattgagcacgccatcaaaaactgtattgagagttacgaaccccgtatctcatccgtatccgtgcatgcagaaaccaatgatggcgatccgctgctgttgaatttccgtatcagcgcgcaggtgagctttgacaacatcggcgatctggtggagttcaatattcagttggataacaaccggcactaccgttttgatcaggatttataatgtcgttcgaaaaatatttcagagatgaactggactatctcagacagctgggacgagatgccgccgttgaaagaccgcatctggcgacctttttatctgagcagggttcggaccctgatgtcgaacggttattagagggttttgccttcctgaccgggaacttacgggctaagatcgacgatcagttccctgagttgacccacggtttgctgaatatgctgtggccgaactatttacggcccacgcctagcatgaccattatcgaatacacccctgatgagaatgtggtgaccgaggcggcgttggtcaaacgtggcacgcagattctcagcaatccgattgccgatgaggattttgtcagcacttccccgaaatctggggcgcaatgcgtgtttactttgtgtcgcgacatctggttgttcccgatggcgattcgcgatatcacggtgaacaatagtaacgagcaaggcattattggcattaatttccaggctaaaaacgagctaaatttccaacacttacagttgaataagctgcgtttctatttaggcgaagaagcttataccagtacgcaaatctacctgtggatcagccactattttgagcgcgcggagctggtggttaacgatattactatcccgatgccggattttgactttgttccggtgggttttgatcgtcaggatgcgctgctgccgtacccaaaaaatgcctatatgggctaccgaattttgcaggaatacttctgttttcaggaaggttttctgttctttgatgtttgcggtattccggatttgccggggcatctgaaagccagcgaatttacgcttaatctgcatttttctcaggcgttgccgcctgatgtcaaggtgcggccaacgaccttccgtatgcactgtacgccggcggtgaacctgttccagcatgatagtgaagccattgcgctggatggcactcaggccgaatacccgctgcgtgccagttatcaccatcccgatcgctacgatattttctccatcgataaagtggatagctggctaagtgagaagggcgacggcaaagggcgctcccgcggaagagcgcgaaactacacgccgtttgaaagcttcgatcaccaaatcgagcatgtgggtgaacgccatgctctttattaccacctacgagtgaaaaaatccttattccgcaaagggttcgaacattacatcgcctttgttcgcggagacgaatctcagcttttacacgccgaagaaaatgtttccgtcagcatgacctgtaccaaccgtgagttgccgatgctactgcgggtgggggatatcaatcagccgaccaaagataacccgtcatttgcttcattccgcaatattacccggccttctgtgccgctttatccggtactggacggcagcctgcattggtctttgctgtcaaatatgtctcttaactatatgtctctgctggagaaagatgcgctgaagcagattctgcgcacctacgatttacccagtatgaacaaccgccaagcagcacgggtttcgcagaaaaaactggatgctattcagcgaatcgataccaaaccggtggaccgtctgtttgctggtgtgccggtacgcgggctgcaatccacgctgtatctggcgcaaagcgcctttaactccgaaggcgagctgtatttgttcagcaccattctggctcactttttctcactctatgccagcgtcaatgcctttcacattttgaaagtggtcaataccgataatcaggaatgttatgaatggccggttcagataggtcaacatgcgttgatgtagtgcccggagacgagtctctagacgtctcccgctataacttttttcagctggtagaactgcttaatcagctctcgggtaaaaaactatcctcgcagggggaggcggtagcctacccggcgggcgagagtattcgcttcagatccagcgccagcctggctttcccaacgcgggatgtggtggcgctggaaaagtcggagcgcggtcaatatcagttggaagtgtcctttctcggtttgcacggcagtcagtcgccgatgcccggttattacctggattcactggcctgggaagatgcacagaatgaaaaccgcctgacggatttccttaatgtattcaatcatcgcctgatcactttattacatcaggtgtggcggaaataccgctatcacatctgtttcgaagacggcggtgtggatgatttctctcaacgcatgtttgcgctggtggggctgggtagtgaggttattcgcaacaaacttcaaattaatcacagcaaaatgctggcttacgccggtttgctggccagtccggggcgttcgccggaggttatctgcgggctggtttcccactgtttcgatttacccgatgtagaactgcacagctggcaattgcgtcaggtcaatatcgacccgtctcagcaaaatcgcttgggcggacgggagaagattcgcggcaaaaagtatctggaaaaatcagtgctgggcagcaatttcactatcggttctcgcgtcgcggatcgcagcggcaagttcatgctttgcatcaacaatttatctcgcgagcgcttcctttcctttttacctaacggcgaaaactatcagccattagtgatgtttgtttcgttcgtgatgcgcgatcagttcgcgtgggatttgcgtctcgggctcgccagcaagcaggtcagtggcatggtacttggggcagaccaaaataatttactcggttggaccagttttttaggcgatccggaagagaaacccgacgtaaccatctgcgtcatggaatgacaacccgcattcaggaatagagaaaatggaaaaacaacagccaaccctcacactgcgggtgctaaacagcgacaaattggaaagtggtaaagcggccagctgcctgttcgatattcaggggggccgagtcggcagtggcagcagcaatttgtggtcgattcaggatcaaatgtcctcggttgatggcgctcagtttgccgtggaatggcaggatggcgcgttctgcctgcgcgttttggggcaaccggtcatggttaatcaggccagcttaacccgcgatgctggttttatccgcctacaggcgggggacaaaattaacgttggcatgttagccatgagctgtcacatcggtcatacgctggccgatcggcaagatccgctgacgttatctcctgaatcattggtttccagctatagcaatccgctggaggcgatgatggaaggaggcgaaccgccgcgcggtgcagaagcgccttatcagggtaatctggccgcgactgtttccaacgactttagtcaggatccgctgcgtattttacaaagtgagagcctgacgacgttaacgcagtcgcccgcgaccgaccccgatgccagtcaatccctacagcaggatcgctacagcagccctctgttttcttcaccgctatcagataccgccaaggacagtgccatggatcaggaatttatcgacctgcctcatatcaaccgccttaccgccattgatcaatcagaaacgttggaaatgcgtgagcaacagcacgtcgctatgaccccgctgatgcgtggcattgatgcgcaattgccgattaataatagccaggaagcccatgattttctggaggaaatcggcaaaacaatgaaagcggccatcgacggcttattggcgttacagcaggtgcagcacggattatcggataaacatttgcgtccgattgaggataacccgctacggctgaatctggattacgacaccacgatgaatgtgctgtttgccgatcagaaaagcccggtgcatctggccgcaccggcggcggtggcggagagcctgaataatgtccgtttacaccatcaggctaatcaggcggcaattggagcggcgttggcaaccatgctggacgcgttttcaccgcagcatttgctggcgcgttttgcgcattatcgtcgcagcaatgaacggcaggaaatggacgccgcctgggcgtgggagatgtacaacagctattaccaggaattggcctccagccgtcagcaaggctttgagaaactgttttgggaagtttatgcgcaatcttatgaccgcgccttacgtcagggattgcaggagagcgcgcaatgacacgcatcgcgagtcattcactggccgtgttgttgctggttctgttattgccgggatgcagtagcacttgggaagcgacgaaaaaagttggtcaggtgatgtgggatcccagtattcccgtgggtgtgaaggacgatcagccttcaacggtgcaaatcactctgctggccgaagcggatattaaccccaatgacagtggcgaagctgcgccgctggagattcaggtgatttatctgagcgaagattccaaattattggccgccgatgacgatcagctaaccagcgaagaattagaaaaagtgttgggcaaaaactacatcgaccatcaggactacaccctgttgcccggtcagtacaaacctttgccgccgattaagttgaaagcagagaaccgttatctcggcgttgtcggtcattacaccgacgcggaaaaagccgaatggaaaaaaattattcgtatcgacggcgttgggcacaactaccaggtgttagtgcatgttcgggcgaacgaaattgatctcaggaaagaggaagaatagcgatgccaaccaagaatcgcgtgatttggcgagaagggctatttatcaagccgcagcatttccagcagcaacagcgccataacgactatgtgttgcacagtcttttatcttcattaatggactatggctacggatttcggtcgttagtattgaatcacgaattattaaaactggggcgcgtgggcattacttcagccagcggtacgctgccggacggctcggtatttgatattccgaatcaggatcacaccccaaaacctttggatgtgaacaatctgaatgacgccgccagtcgtgatatttatctggcgttgccgatgcaaaacgacgcaataaacgaagtggccaacgcgcaaagcagcggagtaggcgctgttcgatatcaagagcgcagcgatagcgtgcgagacttgcatactcagggcggcgatgtgagcgacctggcattagcgcagttagcgccacgtttgatgcaaggttccgaagatctcagcgcttttaccgttttgccgctgtgtcgcatcaaggaaaggcgtccagacggagccattgttttagacgcggagtttattccaacctgcacttcgatttcggtttctcctgaactcaaacgctttatggatgaagttgagggaacgctggtagaacgcgccaaactattggctaagcgtatcggttcccccggccagcaagggattgcggacgtggccgaatttatgatgctgcaattgtttaaccgcgtgcagccattgttcacccacagtgcctatctctccacgttacatccgcaagagttctactgccaattggtgcaaacctgcggcgagctgagaacctttaccgatgagtcgcgtctggccggtattttcccggtgtataaccacgataatctgacggacagttttgttccgctgatgttggcgatgcgtcaggcgctcagtaccgttctgacgccgcgcgccatatcaattcaactgatggtgcaggctcacggcattcgggtggcaacgattaacgaccgcgatctgctgcgtagcgccgatttcgtgttggctattcgggcacagattccacaggaacaactgcgtcgccagtttattcagcaaactaaaatcacttccctggaaaaaatccgcgatctggtcagcgtccagcttccgggcgtgccgctggtggcgttatctgctgcgccgcgtcagttgccttaccattctggatacacctatttcatgctggatcagcaaagtcaggcctggaaagacattcagcaaagtaatgccattgcgttccacgtatccggcgacttcccagagctggatatgcagttctgggcgatcaggagcagctaaccatgagcgaaatcgcaccgaatattgcgtcattatttgatgagccggaagccgcgccgacgactcgccagtaccaattggagctgcgcggcgaaagtttgaacccgatggtagatgccgctacgccactgctgggtatggtgatgcgcctgaaaaatatggctaatcaggcgttgccggagcagctttatcagcaggtggtgacggatattcgcgccatcgaacagtttttacagaccaaaggctatgagccgggtgccattgtctctttccgctacatgctgtgtaccttcatcgatgaaaccgctttgggacacggctggaatagtcaaaacggttggttacagcaatcgctgttggtgcagtttcacaacgaaacctgggggggagaaaaaatctatgtgttgctggaacgcctgatgggcgaaccgcagcgttacaaggatttgttggaattcatctatctgtgtttctgtcttggctaccgagggcgctataaggtcagtgcgccgcagggggatgaatttgaacgtttattcagacggttacatcaccaattgcatgaaatgcgcggcgatgcgccgccgacggtattacacctcaacgccggagagtcttccggccgttatcggttaagcaagcgcttaactatcaaacatttactgtggggcggattagggctgttagcgctggtctacgggttttatctgattcgtttacacgatcaaacccaagatatcttgcagcagctaaacaacttattgagctaaggaaggccaaatgatccgcatagatttacccacattagttaatcgcctcaatcccatcgcgaaacatgcgctggaaacggccgccgcccactgtgtcagcgagcaggaaatcgaaattacggtttctcaggtgttgctgcaattgctgaatacgccgttgagtgatgtgcgtttaattatcaataaagctgaaatcgaccaagatagcttgagggaacagttggacacccgcgttcccagtcatcaggtagtgactcagtcttacccaagcttttcaccgctattgatcgagtggttgcaggatagctggctgctgtcctccacggaaatggatcacggcgaaatgcgcagcggggtcatgctgatgactttgctgatgagcccggcgcgctatctttccgcacgtgccgctcaattattggctccggtaaaccgcgagttattaaggcaaaactttagtcagtggacgacggattccgcagaaactcaggttgtttctcttgcggcaggccaaacctctgccgttcaacctaacggtgaaagtttgttagcccgttacgccagcaacatgaccgaacaggcgcgcagcggcaagcttgatccggtgctgtgtcgcgatgaagaaatcgatctgatgatcgatattctgtgccgtcgccgcaaaaacaacccgattgtggtaggggaagccggcgtagggaaaagcgcgttgatcgaaggactggcgctgcgaattgtggccgagcaagtgccgcaaaaattgttgagtgcggaattgatgacgctggatctgggcgcgctgcaagcgggcgcggcggtgaaaggggagtttgagaaacgcttcaaaggcattatggcggaagttaggcagtctgaaacgcccattattctgtttattgatgaagcccataccttgattggcgcaggtaatcagcaaggtggtctggatatttccaacctgctgaaaccggcgctagcgcgcggtgaattgaaaaccatcgccgctacgacctggagcgaatacaaaaagtattttgagaaagatgccgcgctgtctcgccgttttcagctggttaaagtttccgaaccgagcgccgccgaggccaccgtgattctgcgcggtttacgcaccatttatgaaaaagcccacggcgtactgattgacgacgaagcgctacaggcggcttctacgctcagcgatcgttatttatctggccgccagttaccggataaggccattgatgtgctggatacagcctgtgcccgcgtagcgatcaatttgaccagtgcgccgcgagaggtttcggctttacagactgaattgcaccagctagctatggaaatccagatgctggagcgcgagctgcatattgggctgagtgacgatagtgaacgcctggcaacgttactgactcagcgggaagagattgacgcccgtcgattggcgctgatggcaagctggcagcagcagcaacagttggttgagcaaattgttgcactgcgcagcattctactggaacaagacgatattaccgccgatgaacgagcggaattagtgcgtttgggtcatgaactggattcattgcaacaggtgcagtcgctggtttctcctcatgtcagcaaatcccaggttgcggcggtgattgccgaatggaccggcgtgccgctgaatcgtttgtcccaaagtgagctggcggttgtgactgagctgccactttatctggaaaagcagatcaaagggcaggataccgccattgcttatttgcatcgtcatttgttgaccgctcgcgccgatttacgccgccccggccgtcctctgggcgctttcctgttggttgggccaagtggggtaggtaaaaccgaaaccgtactgcaaatttcagacttattgttcggtggccagcgttatctgaccaccatcaatatgtctgagtttcaggaaaaacacaccgtatcccgcctgattggttctcctccaggctacgtgggctatggcgaaggcggcgtattgaccgaagccattcgtcagaaaccttattcggttgtgttgctggatgaagtggaaaaagcgcatccagacgttctcaatctgttctatcaggctttcgataaaggtgagctggccgacggcgaagggcggattattgattgcaaaaacgtggtgttcttcctgacttccaatctcggctatcaaaccatcgtcgataacgtcgctgatgcggattccatcaacgatctgctgtatcccgaactggctgctttctttaaaccggcgctgctggcgcgtatggaagtgattccgtatttgccgctgggacgtgaaaccctgctggcgattattgccagtaaattgcagcggttggataacttgttgcgtcaacgatttaacgccgaagtcgtgattgacgatgcggttacggaagaaatcttgctgcggaccactcgcgccgaaaacggtgcgcgcatgttggagtccattattgatggcgtcctgctaccgccggtctctttgttattactgcaaaaaatggcggcgggaagtgacattggctttattcgtatcgcagtagacggacacagctttgttgcagaggtagaggacaaggtatgaaacagcggctaaaaagcgtattggcgctattggataacgacaccattgagcaactgatacaccactttttgcaggttaatcatcgtcggcaacgttttgatgctttgctggttaccatgctgaacgtcaatgaaagtcgtctcgattgttacagcctacctcggcaggacgagcgcgcgacgctgaaactcgacgttcaaattgatgaaatcaaccatccgctggtacaggttttacgtaacggcgtccccgcagtgtgggattccttacagcgcggtgtgcgtatcgaaaacgccgattttcgcggttttgtgcaagaactgcccagcgcctgtggtttgtacgcgctgccgttgttcaactgcaacggtcaggcctgcggcgtggtggcggtatttgccgaaaacattgagcactacaccctcgccaacggcatgtttagcatttactgccatattttccagcatcgtttgaataaattgcaggaactggaacagcagcgagcgcaactgcgacagattcgcgaagtattcaaagcgcagcagcaacgacaaaagcagctggatgagttgctggtctccctcagcacatcggataacaacctgtctccggcaggtttatctaacgattacagcaaaatagacgatctgaccgaagcggtggaagagtttgaatgcaccattttgcgtcagcgtcagcgcatgtacggcacggataaaaaacgcatcgccgccagcctgaatatggcaccacgcacgctcgcctataagttggctaagtatcggtttcagttatgaaaaagttgatattaacagccacattgatattggcttgcagccacagtctgatggctgcagaagatgtacctaccgttacccaacaatcacctcagttatcggcgctgactcagtgtcgcaatgagccgtctcccttggttcgactagcttgttacgatcaggccagcagtccggttggcgtaaccgatgaccgaatgatggggccgggttggcgtcgtgccatggtgcaggaaaaagggcgggaggcacattccctggcttttctgacccgccagtccgctggcaacaatccgaccgtgattatcaccacgccggcgataggaatgccgcctccgcgtccggttctgatgtttagctgtatcgataacatcacccgcatgcaggtggcactggttgcgccgcaaaaggaaggcgaaggcgcgctcacctttgttaccgaccgcactaaattcgataccgaatggtttgttcgcgaagagggtttcctgctggaagccagtcgcgggctggccggtattgatgaaatcaaacgactgctggatggagaaaccttggccatcagctcaaaacaaggggcggcagtgcggctgaccttcaacatttcctcgctggcagaggcgatcaagccactgcgcagcgcttgtcattggtgaagttgatatgaatgctatcgcccaacatccctggcggaatttgctgctagccccgttagccgacgggcgcgcagcgctggcgctcaaagacgataacccgcgctgggagtttatcgacggcgaaatggtgaagctgggttcgcttacccacgccagtctgaatattgctgaattgcagcagcaggcgatgacgctgctgtccgaagaaagcaaagacatgcgcttactgacccacctgttgcgtactttgcagcacggtggcgaaccgcagaatatcttgctggcgatgcaattgctttgtgattacgtcagccatttttgggccgaagcctggccgcacaatggtttgcataaacgccgtttggcacagcagatcgttaaacgtttcgacgccgcagccagtctttttagccaacgagccaccggtgaacaacggctggaagctttagggcaactggcgcgactggcacagtgttggcacgaaagtgagcctcaattggcgaaagaagtggatgagctgagtttcccctatcgctatcagccagaacctcaggttgcggatacaccgcagaccagcagcccgtctttatccagcggcagcgcgccggtttcttctgtcgatgcgccggttacggaagcgccgattgccagcgtcacggtggacagttccagcgatcgtgcgtggcggcaaacgctgctgaaagtggcggatttgctgtgtgaacgccatccggacagcgacagcggctaccgactccgacgccacgcggtctttagcactatcaccacgccgcctcagtctcagagcgatggccgcacgccgctggccgccgtttcagcggatcgcaccgccagctatcaggctgcgttaccggcagccgatttagcgctgtggcagcaaatcgagcaaagcctgacgctggctccttattggctggacgggcattttctgtcggcgcaggtggctgaacgtttgggttatccgctggtggcgcaggcgattcaaagcgagcttcgcgctttcctggctcgcctgcctgccctgcgggaactgagctttaccgataaaaccccgtttctctctgtggaaaccgccgcttggttgcaaccgcaggaaacgacggtaactaccggtagcgcccgtgaggatcagaatgatatctggcagtgctatgagcaacagggattggaagcggctctggctgcggttgatcaacagcaacagcaacaaactgaacctcgggatcgtttctatagccagttgcttagtgcgcaattattggaaaaggccgggctggcggcaatggcgcaacagcagtatcagagcctttatttggcagggaaacagttgtcattaccggagtgggagccttcgctctttgccgggttatcagaaaaacagcggcggcagaactcatgacagccacgatgcgacacaggaatgttaatcaatgaaaatgccttcaatacccaaaatgccaaagatgccttcatttttacgtttattgaagcccattattccgcgttttaagtcttcaataccgatattgctggggctgctctggtgcatcgctttggtagtgatttggctgtgggggccactgtggcaaatgggggaacagcatccgctagaatcacagctgagtcgttggctggtgacggctgtgctggtattggttgcggtgtgctggctgacgtggcgagttacgcgacggctgcaagaattagaaaaactccaactggatcaacagcagcgggaagaagatccggtgcaaatcgatttggatcggcagaacggttatctgtctcgctggttgcagcagctacagcgctatctcaacacgccacgctatttgtatcagctgccgtggtatctgatgttgggtaccgaacagagcggtaaaactacgctgctgcgggaaggttataaactgacggaaatctacagccccgacgccagtaaaggcgatgacgccgcacagctacaggtgcgctgctgggccggtgaaaaagcggtggttgtcgatccgaccggaaagcttatcgagcaaccggatcaaggagaggaaggcaaacctcagctttattctcgcttgtggcaggaactgctgggctggctgcaacataaccgtaagcgtcaaccgctcaacggcatcatcgttacagtcgatgtttatcagttgctgaccgccaataaagatcggcgggaaagttatatcgaccatatgcgccagcgtctgcacgatgtgcaaatgacgctgcacagccagattccagtctatttggtgctgaccaagctggatttgctgtacggctttgaggcgatgtatcagtcgttggataaaacccagcgcgaagcgattttaggcgtgactttcactctgaatacgcaggatgaagatcactggcgcagcgagttgaatcaattctggcaacagtggatggcacaactaaacaacgccatgccggagatgatgtttaacggtgtggatagcgatcagcgcccgcagctattcagttttacccgtcagattcacggtttgcatgattacgtgctgcaaatgctcgatcgtatgctgtttagcggcgatagcaaaccggcgctgctccgcggggtttatctgacctcggctcagcagcgtggacaaatggacgacctgtttacccaatcggcggcggtgcagtatcaccttgggccgcaggcattcccgacctggccggtgggtgacacttcttcttatttcgccaaaggattatttaataatgtcctgctggccgagccaaatctggccggtgaaagtcgccaatggctgcgcaattctcgtcgccgcatgatggtattcagcgcctgcggagcggtggcgattgtcgggttgctattcggttggcatcagtattatcaaagtaactatcgggccggacaagtggtgttgactcaggctaaaaccttcttggaaattccgcctccgcaaggtgaagaccaatatggcaacctacagttaccgctgcttgacccgattcggcaggcaacactggcctacggtaactaccatgagcgcaatagcctgttagcggatctggggttgtatcaaggcagcaaaattgggccttacgtcgaaaatacctatctgcaattgttggagcagcgcttcttgccatcgctgatgagcgggttattggttcagctaaaagctgcgccggcgggcagtgagcagaaactggaaatcctgcgcgtgatgcgcatgttggaagacggcagcggtcgtaataaagggctggtggagcagtatatgcgtaaccgctggagcgagaagtttaacggccagcgtaatctgcaaaatcagctgatggatcatctggattacgcgttggagcataccgactggaaacgcagccgggataacggcgatgtgcagtcgattcagaatttcgcgccatatgttccggcggtaaaagccgcgcagcaggaactcagtaaactgtctctgtatcagcgggtgtaccaaaacctacgtatcaaagggcaggatgttttaccgcctgcgttgaatctacgcgatcaaatcggtgccagcttcgatggcatttttgtagccaataacgaagatctgctgatggtaccgcagttcctgacgcgtcagggcttgcaaagctacttcgtaaagcaaaatgaccagttgatcgatctgaccagtatggatagctgggttttgagtttgtcgaaaaacgtggaatacagcgataccgatcgcaaagaaattcagcggcagattaccgagcagtatctgggcgattacaccgccgcatggcgtgcggcgatcaacaacctggagatccgtcagtttgaggatctgccacaggcgatcgctgccattgagcaagtgatcagcggtgaacagccgatccgtcgagcgctacaaaccctgagcaacaacacgcaattacctgccgccagcggcgaagctgatgccaaagatctgctggaacagccggattaccgcctgatgtcgcggattaaccgcgagtttgcgccggaaactgctgcgctgattgaacacggtgataaaggcagtacgttgcaaagcgtctatcaaaaactgacggatttgcatcgctacatgctggcgattcagaactcgccggtaccggggaaagcggcgttgaaagcggttcagcttcggttggatcaaaataacagcgacccgatttttgaagtacagcaattggccaaaaacctcccagagccgctgaatcgttgggtgggcgatctggcggagcaagcctggcatgttgttatgatggaagcgattcaatcgctggaagtggaatggaacgacacggtagtgaaacagtatcgcacctatctggcgggccgctatccgtttaatcctgaatcgacacaggatgtgccgctgagcgagtttgaacgtttcttcgcgccaaaaggtgtgctggacaacttctatcagcaaaacctcaaacctttcgtcgaaaacaatctgaccaacggcagcgacggcgagttgctgatccgtgatgacgtcctgcaacagttacaggtagcgcagaaaattcgtgagactttctttagcagccagaacgggttaggcacgcagttcgctattgaaccggtggcgctggcggtcaataaacggcgcagcgtgctgaatctagacgggcaattgctggattacgcccacggccgcagcagtaaggtgcatttggtgtggcctaactccatgcgctcgggtgtggaaagcaaaatcactctggtgccggacgcttctggtaaatcgccgcgcagcatcgcctttagcggcccatgggcacagttacggctgattaacgccggtgaactgaccaatgtacgggaagattccttcgatgtgcgctttaacgttgacggcggccatatgacctatcgcattaccgttgatgagtcggataacccctttgctggcggactgtttagtaaattcaaattaccggacacgctctattaatgagtatgcccgacgcgcgtcgtcgggctttttttaaggaagagttttagtgagcgacaataaacagggattggttatccgcaccggtggcgatccgcgccaatggccggaattcaccgcgatccgtgaagaaattaacaaagccaatcatccctcgcagccacaggttaattggcggctaattgagtctttagccttaacgctgtttcgcagtaacggcgtcgatctgcaaaccggcgtgtattacaccctggcgcgtactcaactgaatgggctgacaggtttcaccgaaggctgcgagctgttggccagcctgattgtcagcgaatgggatcgtttgtggccggaaaaaccgctggcacgtattgaaatgctggaatggttcaccgcgcgactgtgtcacttgttgcgtcagcaggtgttcagcagtgaagatttacgactgatttatcgcgccgaacgtgccttgcagctcatgatcgataagctgcagcaggtgcaactgagccgagtgccgcgcatcgaaaatatgttgtatctgatgcaaaacaccgcgaaaaaactggagcgagccactgaagccgccgcgccgtccatccaggcctatcaaatgccgccgttggtgtatctgaccgcttcggatgatgccccgtcatcgcgggaagtgccacccgcgccaccccagccacagcatgacgatttggaacatgcacgagtgcaggtgcgctttgtgccgaccaagcgtatgtcggcgctgcgaggtttcaatttgggcatcggtttttcgctattgatcgccgcaggggtctatctgatgcaagtgcggccaatggcgcaacagctggctgctgtggccgctgagcctgaaggttcagccttactgtggctacaccagccggagctggagacctatggcgagcaaatggatcggctggctaaacgttctccgctggaagtgttaggtgggccagatgcgctaatgaaaaccgcccagcagctatggcctgcagatgcccggcaaaccggggtcagccaacgctggcaggagcaactgcaagccagaatgggcagcaatcaggattccgctcattactatcaggccaaaatgggcgttcagcagctttctgaaaaactgttagagcaggaaaaacagaaaggcagcctgaccatttcttatttaaaaactgcgctctatcgcattcaaaacaaccttaacagcgaaatcccgctggaagagctattgcgccagttctctgcgcaacgggagcagaagaaaggcgtctcgccggtattgatcaaacaaattgatgaccgcttcgatgccttactaagccgctaccaccaactgacggttcaaactgagccagcccattaacgccgacgagaagggataaccatgtttagtcgtgatgagaaaaaagataaaaccggcgcaagcgatgcattaggagccgcagccgttgatggcgtttccggtctggcggacggcgctggcatggtggccagcgtcgccggtggcagcgtggggcgtgcggcagagaaagtatccaaagtggcaggaaccgctagcaaagccgtagataccgcgaaaaatgcctccggtatggcttcgaaagcgatggataccgcgaaaaatatggcgggcatggcctcaaaaggcgtagatgcggcgaaaaatatcggtggaagcgccagcggagctttggatactgcccaaaatatcgttgctggcccagcatctaaagcgatgaaaaccgtacagggtgcagcatcacaagcgaccggcgcgatgaatagcgccaaaaataccgtcgggcgtgcggcggcgatggctggctcggcagctggcctcagcggcgcagcgggtttactgggcgggataaaacagccttcggggctgcaatttacgctaaccgccggtggtttgccggagcagactttcgtggtggtggatttcagcctgagcgaaggattgtcatcaccttttattttacacgttggtctggccagcgccgatcctgccattgcgtttgacgcggtgctagacgaagtggccaccctgtttatctggcgtgaaggcgagctgcaacgcagcattaccggtatggtctccagctttgaacagggcgataccggttttcgtcagacgcgctacagcatggtgattcgccccgatttttggcgtacttctctacgtcataactcccgtattttccagcagcaatccattcagaccatcgtttcttcgcttctgaaagagaacggtatcaatgacttcgccttcgctttgcgtaatccgcacccagaacgcgaattctgcgtgcagtatcaagagtctgatttccattttattcagagacttaccgccgaagaagggatgttttactactttgaattcgccaacggtaagaacacgctgatttttgccgatgatgtcggctctctaccgccgggagccgttttgccttacaacccgaccaaagcggcgcaggccaaagaactcagcatcaacacttttaaacgcagcgcgcaggtgcggactgccagcgtgcagttaaaggattacacctttaaaaatccaaactgggcggcggaattcaacgaacaggcacgagagctggaaaatcagcgtccagactacgagcacttcgattttcccggtcgttttaaagacgaacagcacgggcaggatttcactcgctatcggttggaggccctgcgtaatgatgccaaccttgggcagggagaaagtaatgatttccggctgcaaccgggtcagctctttaccctgactagccaccctcgggccgatctcaatcgtaaatggcagttggtcagcattcagcatcacggcaagcagatgcaggcactggaacaggaatctggcgatcaggggacggtgctgtttaacagctttagctttattccggccagtcaaagctggcggccaacgccgttgccaaaaccggtagttgatggcccgcaaatcgccatggtagtagggccgccgggagaggagatttactgcgatcaatacgggcgaattcgtctgcaattcttgtgggatcgctatggcaaatccaacgataacagttcctgctggattcgggtaacgcagccgtgggccggacaaggttgggggatgttagccattccgcgtattggtcaggaagtggtggtggatttccttcatggcgatccggatcagcctatcgtgacggggcgcacttatcacgccaataacatcccgccgggaaccctgccgggcagtaaaacccaaatggcgttccgatccaaaacccacaaaggggacggttttaacgaactgcgtttcgaagatgagaaaaacagtgaagggctgtttatgcatgcgcagaaagatatgacgaccaatgtgcttaacgatcgggtgaccaccgtggttcacgatcacaccgaaagcgtcggtcacgatcaggtgatttctgtgcgtaacgatcgtcataaagaagttgcgggtaacgaagtgacttctatcaccaagcagcgccgcatcatggttcagggtagtagcagtctggaagtcaccggcagcatcatgattcagtcttcggccgaggggattcagatcggcaccgccggtgccagtattactttggataatgcaggcaatatcaccattgagggcgccagtattacgctgaaaggcaacccgataaacctcaattaacgaacattcttcaccaaataattataagccacggagcgactatatgactcaccctgcttacctaatcaatgaaggcactttagccattccagccaactggcgcgatgaaaccatgaatgtgtttattgcccccgacgacagcggaatcaatttagtggtaagccgtatggcggttccggtcgggctggataacgaaagttactacgcgcaggttatcgagcaatttcaaaccagtctgcccggttataaagagcgcagccttacgaccgtcacgttgagcgaacaaccggctcgtttgctggaatatttttggaaaagccccgaaggggaaatgcaccaaagcgtggtgatgcaggtgcgtggcaccaagttactgaccttcaccatcacctcaccaaaagtactggcggagagccaaaaaacagcgttgctggcgattatttatagctaccaggctgcgtaaaagtgtgtaacgcgggaggcgtttcatgtcgttaacagatgatattgtgcagcgaattgcccgagttggggccattcatgccagccccaaaccggtcagttccggcgcgcccggaccggctgcggcgcgattgggcgatcctatcaagcatgccagttttctcggtgcattagccggagccgtggttggggcactcattagcgtagctatttttgcggtggctgctgcggtggtggtgggcaccggtgggttggcgaccgtggcagtactggcgttaggcacagctgggacttttgctatgggagggataatcagtaaggccagttcggcggtcagcgcgatggtagacagcgttggcccgacggacggcgttctactcagcggctctggcgatgtatttatcgaaggtaaagcggctgcccgtgcaaccggcgataccgctatgtgtagcaaacacagcgcgccggcgactatcgcccaaggcagcgaaagcgttgccatcaacggtatgccctcggcgcgggtgggggacaaattgacctgcggtccaaccattaaatccggcgcatctacggtatttatcggttccggtcagggtggctatctagaagtggccgaagaattttctatgctggaaaaagccattctggtcgccgtagaattcttggttccaccgagtaaaggtctattaaccggcacagcaaaactgtttaccaaagcggggagtaaagccgcagccaaaggcgcaatcatgggtgctaaacaggctgcgaaaatatgcgcgggtaaaaccttatcttgcgtaactgccgcatttaaaagtcataaaggcatagcacgctttactgaagcgggtaagaaattcgtcaagggtgaccctattgacgtggtcactggtcaattggtcgagcagcgtaccgatctgatgttaggccaaaccttgtcgctggcgtttacccgaacctgggctgagggctgttttggggtattaggggctaattgggcggatagcttcagcgaatacgcggttatcgatcctgaaaatgacagtattgagattttcactcaggaaggcagttctctgaacttttcgctaccggatggctatgcgttcagttttaatccggatcaccctgatttcactgtgacgcgcggcaacaagggtgtcatcctgacggatcgccgcagcggtattcagcgtcatttcgccttagtcgggcaaaaggatcggaataaatttctgcttagcgctcatcaggacattaacggcaatcatatcgatttttgttatgacgaaaggcaacagctcacacgcatttgtcacagcgacggttcggaactgacgctgatctggaatgcgtcgcagcaactgaccgaaattcgccgcaccgacgaaggtttatatgatgttctggcgagttatcgctatcacgacagcggttttatggcggaagcggatagcaccgagttctaccatcttttctatgaatataacgcgcagggttggatcagtcgctggcatgataatgatcaaacctggacggcatatcattatgatgcgcaaggacgttgtaccgacagcataggcgcagacggttattacccggtgcactttgactatttgccggggctgacgcgagtcagtaacccgcaaggagcaaccaccgagttttattttactccgatgaatcaggtgaccgaggttcgttctcccaccggaaatatcacccgatacgagtacgacagttacggcaatctgttgtcgcagatcactccttcaggccatcaaattaccctgagctaccttaaagataccggtctggtgacttcatttactaacgctatgggcgcctgctggcaatacagttatgacgatagccaaagactgttcggcattaccgatccgttagagcgtacctggctgcaacagtatgatgaaaaagggaacccccaaagttttaccgcaccagacggcagcagtatcacgttggaacgtaatgaatttgggttggtgactacgcaaattcacagcgacggtagccagcgcagaatggaatacgatcatcaccagcgtctgttccgcattttcgatgaagaacagcgggtgatgaatctgcgttacgacagccgggataatctgcaaactctcagcacccctggcggagccttatggcgctggcgctatgacaggcatcaacggctggcggtaagcgatcgcccgaacaacagtcaggagcactttacccacgatcgtcacggtaatctgacccaatatcatgatgccaacggggttagttggacggtggaatacggcgcttttgacctaccgatttcccgccgcgacggtgaaggccatatctggcgctatcgctacgatgctgacacgctacaactgatagcagtgactaatccccaaggcgaatcctaccgctatacgttggatagcgaagggcgggtcatagaggaacgggattacgccgatgcggtgtggtattaccgctacgatgccgagggaaattgtagccagaagcaggatgcgctagggaatatcacgcattatagctacgacccttgcgggcgcttactgacccagagcaacccggaaggagcgacgcagtatcaatacgatatgatggggcgtttgctgagcgttaccgcaccggatagtactttgcactttgagtatgacgaacaggatagaccgattcgcgagattcaggtagccggtgaaattctgcgtcgttatccggataaccagacgttggaacgagaaattaccagtgttgggcacgagtcgggcagttggctgactcgtattggcgtaaaccgcaccggtgagcttattcagctggaattgccagccggacaaagtttacagctacagcgggatgccgcggggcaggaagcgggacgcgaagcggcggcgggttttatgctgcgtcagcaatacgacctgatggggcaggttatccatcaacgcgcaggccgcaatacgcgggtattccgacaggaagaactgagtgacattcctcagcctacgttggccgaactggatcgcgaatatcagtatgacgctggtttgcagttggttgcgatcaacgatgatgttgaacgactgaattatgttgtcaatggcaacggacaggtgatttcggtcagcgaacgtaatcaactgcgcgagcattaccgttatgacgccagcggctatccactacccagacgggtgggcgatcaacagtgcggcgcagaggatgaaatttatcaccgcggccatcgtttaaatcgtcttggtaatcagctttatgaatatgacgccgctggccgaatgacggcgcgccgtacgcaacaggaaggcttccgaccggaatacacgcgatttatctggaatagccagaaccagctggtggaattgcgcaaacaaaatggtgatagctggcgctaccgttacgatgcctttgggcgccgtatcagcaaaacctgtgaacagcaaggcatccgtgtgagctatttatgggacggtgatgttattgctgaaattcgcgattatcgacagggcgagttgcaaaaaatccgacattgggtgtttaatggctgggagctgatagcgcaacaggaatgccgagtcagtgagggcgaggtaggcgaagtcgaaactcactacgcggtcagcgccccaacgggggaacccctcgcgctctttaaccccgcaggaaaacgcgtctggcaacgcgccaaccattcgttatatggcgcagcgctggcgaaagtgctcaaccacagccagccagaacccggtttaaaattcgccggccagcttctggatgaagaatcggggctgcactacaaccgcttccgctactacgacccgcaggcctgctgttacttaagtccggacccgatagggctggcgggggggttaaacttatatgcgtatgtaccaaatccacttacatggatagatccgctgggactagcgacgtgtcctcctgtaggaaatgctggtaatgatggctataagttctcgtttggctcacttcgtcatatattaagaaggcactctcctcatgtcggtcctcctaagcaagaaccatatgcatcaatgaagcctaaaaggcaaaaaggttcaccattcccatcggagtggagcaatagagatattgcgcatgctactgtggaggtcgctaataatcctgcaaatcaagtcatttctaatagggaagggttctttggtaaggtatttgaaggcacatcgacccaaaatggggtaacacaaaaaatacgtgttattacagaccatgttgatccgcatattggtggtactggtccaggtgttattacatctagtattccaattaaataagagagggttgatgaaatataccacatgtcaaaattgttattctagctatgaatcggatctggaaagatgtccagactgtaatgcatctcaaggtgaaaaagatgatgggttaatagtttttacagaagaagctcgttctgaaatatcacgccttggcggcattgtgtatgatgttattcatctccctgaagagcgctatttaattccatgtgagtggggggtgcttctttataataatgccaaaaagtctttttggcattacctttgtggaattgttgatgcagttgtggttaatgaatatgtggagatcacacatggagataagagagactatctgacacttgatgatggaagattagttaagagggagaatgttggctaactctcttctggcgtggaatgatcctctcaggatcattcctgctaattatgaaatgtcagtgcacatacaactctgctgaatcctaatcaccacctgaccgggcatcacgctgatcaccagcggttgcccggtcaggccgcactgtgtcagccagtcctctggcagagacagattgccgttatcccgtatctagttcacgtaaccacagccagccagaacccggtttaaaattcgccggccagcttctggatgaagaatcggggctgcactacaaccgcttccgctactacgacccgcaggcctgctgttacttaagtccggacccgatagggctggcggggggattaaacttatacgcgtatgtaccaaatccattaacgtggatcgatccactggggttggcggggtgccatactcaaaaatatgaagtaggaacttttgatgatttacagcggcgttcaaaagttggtgatggattagatattcaccatgttactcagaaacaccctgcaggccaggttatatctggttatgacccaaagactgcaccatcaatggctgttccgagagctgaacataaattaataccaacaactaaaggtacttttacaggaacgccaagggatttattagcgaaagatatacgagatcttcgtaactataccaatgcaccaccttcagccattaaagatcttatcaggctcaataaagaaatgttccctgaggcgtttactaaattaaggtaagttaaatggatgctaataagtttgtagatatattaaaccttgttgttaaagatgccgcggtagaagatataatatctatactggaatccccaccaggtaaaaagccatcaaaggaactggttgatttatccggcttttataattcacaggccgatgaggctaaagaatttataaaacagataatcaagcttgttgccgatgatgctttattcggtatgctatgtgttatcgatggcgttcgtgctatagaggatgatgaaaataaaggggagttggttttgacttatcagaaagataatgaattgtctgtcgtgttaaacgaagataaagatttgcacgatatatacaacgccaattagactaaagccgggaagatcctctttagttcttctcggcttttttatctgttgttacgctaatatattaccctgctgagtcctaatcaccaccttgccaggcatcacgctgatcgccagcggttcccggtcaggccacactacgtcagccagtcctctggcagagacagattgccgttatcccgtatctagttcacgtaaccacagccagccagaacccggtttaaaattcgccggccagcttctggatgaagaatcgggcctgcactacaaccgcttccgctactacgacccgcaggcctgctgttacttaagtccggacccgatagggctggcgggggggatgaacttatatagttacgttccgaacccactgacatatattgatccgctagggctggcatcctgtcgtctaaataatatgggaagaaccccaggcaaaaatagcaagactggcagagaagttattgaacgaatgcgtggtgaaggtcgtattcgtggtgctggtagtgatatgaggtttaaaagttcaacggataataaatggtatcgcgttcaggatgctgatatggctcacttaacagatgctgttaaatattggaatcagaaaggcggttattatggcccgaaatctaaagaagttagagcctttatgagagattccaaaaattatgaattagaatattttgggcataaccgttctcaaggtgctaaattgcctgatagatatagagatccaagtgattttattgggccagcagaaatgtcacaatatttttaataggtgggtgtatgaaagagcttgcagaagataacctggaattagaagaaaaaatagtatctatcatagaggctgggaatgtttacagtacgaatggtgactttgactctgcattgaaaaattatcaagaggcatgggagttactgccggaaccaaaattggaatgggaaatgttaagttcatggttatcaggttctttttatactgcatattttaatcggtcagattttgaaagtgcaaaatattggggtgaggcgcaacttaaagcaacaagctctaatatagatacagcaccatcaatcgacctgggaatggtctgttatgagttagagcaatatgatgaatcatataaatactttgacgatgcctataattatggtaaggctcgtgcatttaaagaaagaccgaagaagtatcttgacttttatttatccaagaaaaaagagatgaagtaaaaataaatggccggaatggatctctttagatctttccggccattttatatgtcgctacgctagtatattactctgttgaacccgaattaccaccttgccgggcatcacgctgatcgccagcggttgcccggtcaggccgcactgcgtcagccagtcctctggcagagacagattgccgttatcccgtatctagttcacgtaaccacagccagccagaacccggtttaaaattcgccggccagcttctggatgaagaatcgggcctgcactacaaccgcttccgctactacgacccgcaggcctgctgttacttaagcccggacccgatagggctggcggggggcgagaatacttacgggtatgtacataacccgctgggatggatagatcccttagggttggcagcttgtccactggcaaacgctggtaaacttaaaccaccgttagcgaaaccaggcgaggacttatttgttggcacatatagccaagtccgtggagcaaatataaagagtggtcttaatccaacccatacaccgcatcatgctattcagaatgctgttagtccgacgacacatgctcgaggaataacgataaacatgcgtaaagatctgcacgaattaacatggacatataaaaaaccgtttgtccgaggtttaacaaataggcaatacctagcaagagacattgttgacctgagaactatattccgtaatgctggatatagtaaggacgttgttaataggcagttgtctgagctaatcaaacaaaacaaagcattatggaaagctatggagctatgaatatgaacagaaatgaagcgctgtctttcttacgtcataatcaaccgatgccggatgatgacgttttaacacaagaactaattaataaatatgatgaggcaagaaagtttttcattgctcatcctgacaaagaggcaatctcattattccttaactcttatggtaatggagatgggtggggagtatatcaattagtagaagattttttttataaatgccatcgcgatgatgtagtgttggaaatacaaaaaacattagaaaacccatctgtaaccgacaatgtaagatactgggttacccaagtatcagcagcattcgctgatgccaaactaaaaaaaggcttggaaatatcgctaaaatcgaagaatgaagatatccgagaggcagcacagttatctcttgatatgattgatgactaatattagaacggggagataatatttggatctttccggtttttttatctgttgttacgctaatacattatcctgttgcacctgaatcaccaccttgccgggcatcacgttgatcgccagcggttgctcggtcaggccgcattgcgtcagccagtcctctggcagagacagattgccgttatcccgtatctagttcacgcagccacagccagccagaacccggtttaaaattcgccggccagcttctggatgaagaatcggggctgcactacaaccgcttccgctactacgacccgcaggcctgctgttacttaagcccggacccgatagggctggcggggggattaaacacctatggttacgttcacaatccgctaggatggatagatccattagggctagctggatgttctactcttgatcgcattattgccgatgctaataaggttgcgtcacctggagggcatataactccaaagcaagcagaaatattaaaaggtaatttaccagtagttcaaagacgtagtgctttccaaaataggttgtcacgtaaagaatttgtgagagatcaaaaatatcttatgagtcaatgggaagcgaatacaggaagagtttggcctactggggcaactccgcatcatataattccattggaaagtgggggggcgaataaatggtggaacttaatgcctacacatggaacattaccaaaccactctttacctggaatacctggcccgcacgcagcaggtggtgtgcttcgtactacagtccaacaaggtaggaaagctttaccgccaggaaccataaccgatttgagattttaatatgattgatattaataaagtgttggaagaaatagataaggcaagattcttttcaaatatgggggtgtctgacatccagaatgaaaatgttattttaattaaagatgttgaaaaggtgttcattaatccatctgatgtggagtttaatggcctttatgctagtgctgagtggcttccgacctcgccaactcaagatgacccattttataaaggtcaaactacatctaaagagcttgcagagcttagaattaaagtaaataaagcagtattaaatgcaactaaagggttacctaaagataaatttatatgcttgccacatgattttagccaggcggcaagaaatggaatatgctttgcttttaggcagtatgtatctgaaaagtatcaaaacctaggaactagatgggaggatgttgtgcggatatattatgctgggcattggcctgttggctttgctcaagaaaaaataatagctatttaatataagactagatagatccaagaaggatctatctagttatttgtaactgtggttacgccagtatattatcctgatgtacttgaatgaccacctgaccaggcatcacgctgatcgccagcggttgcccggtcaggccgcactgcgtcagccagtcctctggcagagacagcttgccgttatcccgtatctagttcacgtaaccacagccagccagaacccggtttaaaattcgccggccagcttctggatgaagaatcggggctgcactacaaccgcttccgctactacgacccgcaggcctgctgttacttaagcccggactcgatagggctggcgggggggatgaacctgtatgcctacgttaaaaaccctcttacatggatagatccgctgggattggctgggtgtaatctcaatcctaaagatattcactacatgcaaagctcaattaaaaatcaaacaggagctcatactgttctggataacgctgctgcattagcaaatggaacacttaaagctgcggatctacctgctattaaggtttggcgggatgctacagggaaaatatggactctagaccatcgaagattggccgcatttaaaatagcaggtcttgaaagcgtaccagtccaataggctacagccaaagaagttgcaggccaaatgtggaaaatgacaacaaaaactgaaggtaagagcatcattttaaaattaggtgatggaattaaacagataataggtggttgaaatggaaaatgatttatatcctgttgaaactagagatgaattaattaaattaattttatctttggcttcggaagcaagaaataatcctgatgagtgggagaataatgatcttccatcttttttagaagcgatggcttcatggatggaagacatggatggtttttataagaatatgaataagccatgcccagataatgccagttggagtgtccttgctgacgtattaatggctgccaggatctacgaataactaaaacaagccggaatgatcataaggtatcttccggcttgttttacctgtcatcatgccaatatattcccctgctgaatcctaatcaccacctgaccgggcattacgctgatcgccagcggttgcccggtcaggccgcactgcgtcagccagtcctctggcagagacagattgccgttatcccgtatctagttcacgtaaccacagccagccagaacccggtttaaatttcgccggccagcttctggatgaagaatcggggctgcactacaaccgcttccgctactacgacccgcaggcctgctgttacttaagcccggacccgatagggctggcggggggcgagaatacttacgggtatgtacataatcctctgtcatgggtcgacccattaggcttagcaggatgttctaccacacttggtaggaacatgatggaggcgatgggactgccgcgttctacgaaatggactgggcatcaagcccaccatataatcccgaaagaattagctaaccatccagcattaaagaagatcaaatattatattgacgatgccggaaacggtatcttcctcagaagagtcgatgatggcactagtgcgatggcaaggcatcagggaagtcatgatggatatacacaagcagttaaaaatgctttagataaaatagatcttaatcaatctaaaggcgctattttgaatcaagtgaaagaaatccaaggaatttctcggaaagggttagagaatggccacccaatcagaccacttgatatggataaagcaggtggtgcattaggaaatggaaaggttaatgctgtctggactaatattttcactaaaggtggctggtaatggatcaaagatacataatcgaacctattgaatttgcatttacaaatgctctctttaaagggttgtctgaagctataagccagaaggttattgttattaataatgttgatgatgcttataagtatgcgtttgagcagaacctcccatcgggttataaagtttggaatgatacgattgaacaatgtcgtaaatctttaaggaaaaataagaagttccaagaggcttatgattttgttaatggtaatcttgaaagtttacaggttaaaaatgcatcatcacttattgagtttagaaagaagagaataaagaaaacgaataccgctcatgatgactttattttctctgaagctaaagaagatgcgttttttgtattgtctacagtagcggtcaatagatacttagataactttataaaagactcctttcttgaagatatatatgcactttacaaagcaggtgcgtggccgtgtggtatgaaaggaagtgtcatcttggtttttgacccagcatcgcttagttaatattattaactctttagattaaatgtgtaaataaaagccgggaagggcctctttgggtcttcccggctatttttttatctgttgttacgtcacagattaccctgccgaaccttaatcaccacctgaccaggcatcacgctgatcgccagcggttgcccggtcaggccgcactgcgtcagccagttctctggcagagacagcttgccgttatcccgtatctagttcacagcaatattatgatcttcaatatggtcaaggtcgtaaaactaggccaactgatatccagtatgtatcaaaatggaaataaaactcttgatgatttctttaggaatatctaatagataattcaaatgttgcagtggaaaaattgattcgtttctttgatgaaatgaataaatagcaaatgagatatctcgtatctttacgagaaggtgatgagaatgatgctgtaaaagcgaaagaagagtgggggttgtatgttttttgtgcgatcttgtttttttgtttacactcttaaattctatgtaattacatccatgaatttaaatcctaaaagtgacattttccaagcgtttaaaattattgtaattaaataacgttgttgtattttaaaagtgagtctttgattttttaaatgtctaaattggcaatgatggtgttgaattttttatattttaaatctaactatttcataattatatgctgttattttttattaaatagcaagtcatttttatcgctaatggtttgatagtgacgcgctattcatctatatcattagaaagaaataaaccttgaggtcagtttgtttaataatagaacccgagaaagcaataccgatgcaataaagacggagaatagcagtgtgaatcttagggtgatgtctgataaattataggcactagagataaaatagaatatgccatcgtggagaatataaactcctatcatcgatgggctgatataagctagtgtctttcttatccattcatatttagtatcaaaattatcaaagataacaaacagacatagactcaaaatgagtacatgaaagttatcaagaaaatagccagcattaaccgttttatacacgtgcagagacataaagctctcatagaaatacatcgatatagctgtagggacgatcaatagtttagccgctattctgacttttatgtttttagtgatttctctacctttggttgaacagagaaaacgtccgaccatatagtaaaatacccatgtccaaagcctgaagtactgggggaaatcgattaaataaggtctttcggtaaaagtactgataatatcaatggaaactgaaaagattaataatccacctaaggtaaagaaggtttgcctgttatttttaagtattttagatattatcggatttattacataaataagcgcgatgctaaataacagccagctttgcaggaaataaccttttttaaatccatcttcattgatgaagtaaaataaaacgttccagaatattatgattgttaaaatggatttgatctttcttaatatatcctgccttgtgatttcttcaatcgagtcaatataacctattatcatgaaaaacagcggtgttgctataatagataagaaatagaggatactcataacctcaccgcttaaaaaacagctgtcggaacaggttttactagcagagtagaatgtgaccgcagaaaagcagctaaggctctttagcgcatggaggccgacatttctcataattgaatcgtcacataagaggggagtccagagggcaaagcgatgccctttatcatctgacttggtgcaattttttttggctgactgtgtctgatcacataccgcagtttgttcattgtcacaccttgggtttgcaacagaaaactcgctatctcatctattcattttaagatatctttgcacaaaacgaaatttctgtcaccgttcatagtgactaactgaaattcataacatcaggtaggaattttgccatcactccctcgtttattccccctttgttcttaccttttaactctattttgccaatccgttaatttttattggtgtcagagtattcctacacaaaagcgtctcactgtcctatataacctaaaaatgccctgtgttttactgattgaacataaaatccgtcggtaagatagcggccataaattaaagaatcgcttctacaaccataaggaagttgattgcttaggttctcagcaaaaaagatcgcgtattggcgtaagtttgccttgaacccggattggtgctttgcacgttgatgtggggataggcagtccgtggcctgcatggagcctgatattacgggtaaaggcatggattatcttttttgttcgacgtcttattttaggatgtgagtaaaatgataagttgcatggtggtagataatgatagatatctgacccttgggatcatatctatggttaaaaaaatatttaccggaatgggaagcaaggaagatattaagttttataagcgtccattccatccagttgatgttgtatttatcggcgttgatgaatccaacttttttgaggcgttagcccgcctagagaaaatagcgctggatactaaggttttcctgattgcggatttaaggttaagtagtttctttcagggaatccccggattccataatgtcaccatgatttatcgtgaagaaactatagacagcctagagtccaaaattaccggcgttattaaacgaacattccgtatcctcactgaagctgcatccgatcgtaaagtagatcagcatgaagtcgttcagaatgatgagcaaaactttcttacgccaagtgaaaatgccgttctggcgttgttcaatgaaggcttttccggcggtgatatcgccaaaatccttaagaagagtcaaaagactgtgagcgggcaaaagcgctctgcgatgagaaagttgggtgtaagaactgatgttgaattgattaagatgtttatgttcaagtaaagaagtttagatatacatgcgtcaacgtctattgttgacttaaacatcgggcactgaatttgcctttttgacaccgatgacaccacggtgattgctaattttaccgtcaggagtttaaggggtactcagtccccatcgataggggactggtagataagagggttaaatatttttcagcttggctacagtgctatcaatatcgatttcgtgatcggagaaggtataagtcacgttttgatgagtggttaccgatagcattttcaggggaaccgttttttccgcaatgttttcttcctgcgggcgaattttattcatcaacagtccaacagaaagcacggtattagctttatccacctctgcctgagccggtacttctttagtaaatgttttgaaagacttaatgctggtaagtttgattctctcattggcaataaaaatgtatttgctctcaatggcaactttaactgcaaaagctgataaacctttgctgttggtcgttggttcaaaagtcacttccgcatttttcttaatcatctcgggattagcaactttaataacgtgaaaataacggttatctccgttttcatcggtgataaaaccaaaacctttatcttcaaaaaaagttgttattctaccgttcatcatgtatctcgtttaagccagtctattagttgcctatgatacaggggaatgctttacagatacagcctgagacctttgccacgtttattagcattgggaatcaccatagatttggttgcaacttaggcagaaatgcaaagtattcacactgacagtgtggcagagattggtgattctatctgtttttctcttttttgtgatctacattctggacaaaacatcgttcaattgctgtactgtaattgacacggttgttgtgtccaactattcacgtaaaggtatgtttgatgtctaagattaaaggtagcgttaagtggttcaatgaatccaaaggtttcggcttcattaccccagaagatggcagtaaggacgttttcgttcatttctctgccatcgctagcaatggtttcaaaactcttgctgaaggccagcgtgtagaatttgaaatcacgaacggtgccaaagggccatctgctgctaatgttatcgctatctaagtagccaatattcttaaaaacccgccccatgggcgggtttttttatggctgaaaatagagccagagcccgttttcgatgattacagtatgagatgaccgtccgataaaacctgggtctggttgttgagattcaggcagtgaggctacagctcatcttaaacgttatcttgaaatactagaataaataaaccttcaggaatgccagcgagatcaatacgcaaaggccaaccatcagtaattctgttagtgttttaggtgatccaaacatgttatttatcccgcgtttcagtgcattaaggtgaaactgttctcaggatacggattatctaatttgaaacttaagaaaacattaaggggataaatagcgcacttaaaagtgagaggagtccccgatttttgcttttttactgtgcgctccacatgttcactaacataaaggccagcattgtcatagctaacgaacccgccagattgaataatatagtcagcccggcccaaatgaatttactgtcttgtagcaagtacaccacttccagcgaaaaagttgagaatgttgtcagcccgccgcaaaagccagttgttattagcattttccaaactggatcaaggtgcgtcattcgattgaataaggctaatgtcaggccaataataaaagcgccaaccaggttaacagtgagagtgccaataggtacgttgggagataacccgtttaatttcatgctgataagccaacgtagcgtactgccaacgccaccgccgataaagactgccagtaatgtggggaacataaacacctttcttgttatcagggagtttgcagaaaggcttaggcgtaattctacgcacctttctgagaaggtaacgtagacatcatcagccttgaggggcggttatggaggaatgtcatctccagagctttaattggatattacactgactttttcttattttaaaccctgaaagtttggtagcctattcgcgattacatcgtgatacttaaatgaccaaggaacaagcgtgaaaatccgaaaggtgaaacccggtgacgaagctgccatctctgaattattgatagcattagattatgcaggaacagatggttttttaaaccagcgtttgctacagcttattgggcatcccgatagcggtttgctggctgcgactatcaatgatgttgtttgcggttttatttcattgcattttatcccgcagatcgcgctggccggtgatttctgtcggatcagttatttatgtgtgagtgagaaggtcaggggagcaggaatcggtaagcaacttctggatgaagctgaaaagatggcgcgcgaacgtggctgtgatcgtatggaattacacagtcattcccgtcgagtgaaagctcatgctttttatctgcgggaaggctatgcagaatcaccgaaatattttaccaagtgcttaactgaataggtatttagctcgctagctcaatacggtctctgccattatctttagcgtgatataaagcggagtcagcggcttttaaccactgttgataattggtcatttctggtttgaattctgatacaccagcgctgactttgagctgcagccccggcgattgattaaagacaattccagccagtttttcctgaatacgccctaatacctcgcaggcctgttccgccgaagtattagggaggatagcgccaaattcatccccgccgtagcggccgacgatatctacggctcttagccccaataatagctcctcggcaagcgccgtaatggcatcatcaccaaccgcgtgaccaaaagtatcattgatggttttaaatttatcgatatccagcagcaccaaggacgcgctgtgtttatagcgacggcagctatcaaactgattatgaagctgatgttcccagtggcgtcggttatacagcccggttaatccatctctcacgctaatacgcaaaagctcctctttgttatctgccaggcgtttggctgtgcgatacgtcacccaaccaagtaacgatggataaataaaaatcatcggtaaacagctatatacctgaattggtgtggtttgcggctggaaaggtagttgaaatatccaggcgaccagtaagcaacctattatctgtaggccaaggcctttaagaaaaaaagattttccgcctgatgcgatattgttcatgctcatcatcgataagatgaccacggagggcagggcattaaacgacattaccgccacccatacgccgcctgaaatagaatccaggcttaaattcagcatttcctggcgatgcggggaattggctcgaagggataattgataggctaggtgtggccaaattaacccgtttatgactagcagtgcccacatccacaacggagtttgtcgggtgattagcactgataagacgcataacataccgatacccaagccaaatatccggggtaggtagatgcggcgggcaaaactcaatccggcctcgcgcgaatttgctctgctatataaggacaattgacgcgctccgaataaatctgattttggggaatgttaaagaatcgacattcagcatgagtcagaatttaattaagcagactcctgcataaatcatagttcaggaacgaaatctgttacatattactgttgttttatccggtattttattcgtaaataatccacaattaagttaatcctattttgagtcctgaacgaataagaaggtatgtatggaaggtatcagtattaccaagctcttagtggtaggtatattgattgtgctgctgttcggcaccagtaaactgcgcactttgggggctgatttaggtgcggcgctgaaaggctttaaaaaagcaatgggcgatgataaagctccgccagccgatatcgcagaaactaaagttgtgccgccggtagagcataaagactagttctagttttatttactgcatggaaattgcagatggtctgaatgaaaacggatatccaggtggagatccgtttcaggctatttgcgatttgagttgtaataaattatgtctatttaacgcggtttttcgcaactaaaaaccagcccagatatgaattcaggcttatatgattatttgacttcctcgcctttggcttgcaagtccgcatgataagaagagcggacgaaaggaccacaggctgcgtgggtaaagcccatagccatggcttcggctttcatctcatcaaactcatccgggctgacgtagcgctgaaccggtaaatgatggcggctaggctgcaaatactggcccaaagtcagcatggtcacgccatgacgacgtaaatcgcgcatgacttcaacgatttctgcgttggtttcacccagacccaccatcagaccagatttggtcggaatatttgggtgcgcttctttgaaacgttccagcagcttcaatgaccattcatagttagcgcctggacgaacctgacgatagacccgcggcacgttttccaggttatggttaaacacgtcaggcggcgttgcagtcagaatatctaatgcgcgatccatacggccacggaaatctggcactaatgtttcgatcttgatcgttgggtttttggcacgaattgccgcgatacagtcagcaaagtgctgagcaccaccgtcgcgtaaatcatcgcggtcaacggatgtgattaccacgtaacgcaaccccatatctttaatggtttgcgccagcttttctggctcgttggcgtctggcagagttggacgaccatgcgctacgtcacagaacgggcagcgacgagtacagattgcgccgaggatcataaaagtcgcagtgccgtgattgaaacactctgacaggttagggcaagaggcttcttcgcaaaccgaatgcaggccgtttttgcgcatcgccgctttgatgccttgaatacggctggaatcagcaggaagcttgattttcatccactcgggtttacgtaacagctcctggcgttcagtcaccacggttttcaccgggattaacgccattttatctgcatcacggtattttacgccgcgttccatctgaatcggtttactcataatcgtgcaggttccagttctgaatctctaatatgagatttttcattaaaatcaacgaaatgagacattcgttaaaaattatttgaaaattgtttaaaaattatatcatctttcccccgattcgttcagcccccaattttgtatgagtttgtgctttcaggtagcagaatcctacgggagaaaccttataaaggatgataatcctctgcctgccaaggctgaagaacggcatccacgtagcccaattggcgaataaactcttgcaccagaatgggttgcacatcgctgagcgttgttcctggccggtatgcactcacttgtgtcatctccataccggcgttaccgcaagggtttatgcgctgaaacggtgacaaatccatatcgatattcagcgctagcccgtggaacgagcagccttgacgaatacgcaaacccaaagagcagactttcttttgcccgatatagacgccgggcgcatctggtcgggcgtgggcctcaataccaaagtgagccaaagtttctaccacggtattctcaatcgcggtaaccaactggcgaacgccgatctttgcacgtttcaaattgatcagaacatacattacctgctggccggggccatggtaggtaacctgtccgccacgatcgctttgaatgacagggatatctcccggcatcagcaggtgttcggctttcccagcttggccttgcgtaaatacctgatggtgttctactagccagatttcatctggggtagtttcatcgcgacattcagtgaaggcgtgcatggcttgagatacaggtgcatagggttgtagccctagctggcgcaaaatgatcttgtgttgttgcaagcgagacatcatctggttacagaaagggtggcgtcagtataccagcaccaccgcagggaaccagtgttgaccggtgaaaaaacggaagtgtgataataattacgcatgaatcacggatatatagataaaataaggcccgagttaattcgggcctctattcgttttttacgcggtgttacagcgcaaaaatctatgggtatttatattgaatcaaatagatatggtttaaattacagaaccatacgaaccagttcaattttacccagttcttcatacagggtttctacctgctcaatgtgttctgcattgatggtgatagagacggagtgatagttgcctttgctgctcggttttacctcaggggtataatcgcccggagcatggcgctgtaccacttcaaccacctggtcaaccagctgtggttcagcaatgcccatcaccttgtaggtaaaggaacaagggaactctagcagttcgttcagtttagttttcatgtgcgctcctgggttgcgaccggacagttgataaggcgaaatgcaaatcacttccggcattaaaaattataactcccgccggagcgggagcttcataatatttataatatgggggcagtcttcagactttcaagcctgtgaccttagccgaaccaatggtggaacatcagtttgatgtaatccaccatgcggctgaagaaaccaccttctttcacttcgttcatcaccaccagcgggcgttgttcgatagttttgccgtccaactggaagttgatgctgccaactacctgattttttgccaaaggtgcgtggatttctggcgtgttcagcacgtagctggctttaagatctttcatacgaccgcgcggaatagtcagataaacgtctttatcaacgcccagctgtacgcgatcggtgtccccgaaccagactggctcagaagcgaactctttaccgactttcaatggcgctacggtttcaaagaagcggaagccccatgtcagcagttttttgctttcggtttcacggcctttgtaggtgtgaccacccagaaccgcggaaatcaaacgcatctggccttcggtagcggaggcaaccagattgtagccagcggcttcggtatggccggttttgataccgtcaacgttcagactggtatcccacagtaaaccgttacggttcatctgacggatattgttgaaggtgaattctttttctttataaatggcgtattcgtctggaacgtcgcgaatcaatgcctgaccaatcaacgccatatcacgagcggagctgtattgaccttcggcatccagaccgtgaacagttttgaaatgggtatttttcaagcccagcgcattcacatagttgttcatcagattcacgaaggaatcctgactgccagcaacgtaatcagccatggccacgcaggcatcgttaccggattgcagattaataccgcgagtcagtttggagaccggaacctgatcccccggtttcaggaacatcaatgacgaaccctggaataccggattgccggttgcccaggcgtctttgcctacggtaaccatgtcttcggggccgattttcccagatttgatcgcctggccgataacatagctggtcatcattttggtcagactggcagggttacggcgcgcatcggcattcatttctgccaatacttttccggagttgtagtcaatcagtacataagcttccgcgtcgatttgtggcacgccgggaatcatggttttcatattgacgtcgtcggcgttagcaacagaagctgcgctcatgacgataacggtgccgagcgttatgctcttgataaaacgagaagtagttacatatttcatgatcaggacaacaacatccgtggggtaagttaagaacgtgccacactatagcagatgaggtcttggcagacatcaggcaatccccatctcttgcggcgtttacacatttttacgtgtgggtggcaacccgacattttaaagcctaaccttctgtttatacacagattaggctctaatttttcttgaaacagcaaaattgctacaaggcgtttccaaaagaatcagatagccagttattatggctaactacggcgcagtgatgataaatgactgctgctgcgcttctgaagataaacgctgttgcagttctgcggcctgttggcggctgctgaacgggcctaactgtacccgatgaacgtttccagcgctggacactttacccggtacgccaaaacgttggctcagagcctgctgccaggtagaggcgcgctgggcatcgcttaatgccccaacctgcacgatgtaagcaccggaagctgaagcggatgatgccgcaggagctaccgaggttatcggaccgggaggactgaccaccggcggcgttaccggctcggcgctttccagcacgccggaaggcaacgaggacggcgcacgtaggaaaccgctgctttgcgcggctacgggctgcgcggcatcggcaccggataagttgctgttttcaattggacgaaccggcgcgtcgttgacgggggcgtcctgctgaatggggttgcccatcgctccagacgttaaatccgggcggcttggcagagcgtagctttgcttggcaatagtggtcccaaccatacctgggccggagagggaaccgtcaggtgaaacattgataaaatcaattttcaccttggtattgttagagatattcaagcgatctgctgcagctttggataaatcaatcacacgtcccggagtataagggccacggtcattgacccgcaccacgatttggcggccattgctcacgttggtgacccgcacgtagctaggaataggcagggtagggtgagcggcggttagcgcattaggatcgaaagtttcgccggtggcagtcgtgttgccattggcttcttcaccataccaggcagccagaccggtctggctgaagttttgcggatctttgatgacgctataggatttcccgttcactttgtaatcctgattaaaattaggattaaaaggttcataacgaggttccgctccgccgatctcttcaatcggcccattataagtctgctgagtttgttctataggtgcttgattttccgtagtacaagctgataacagcacgctgacgacgccgatccaaagccattccttacgcattgctcacctctataaatttttagataacatttttcgatgagtatgtatcgacatcacgataccaaacccggccatcaggactatcagcgccgagccaccgtagctgaccaaaggcaaaggtacgccaactacgggtagaattccactgaccataccaatgttaacaaacacatacacaaacagtatcagcatcagcccaccgaccatcactcggccaaaggtggtttgcgcatgagcggcgattaccaacccacgcataatagtacaaagatacagacccagcagaaccaatacgcccaccagacctaattcttctgctaataccgcaaaaataaagtcggtatggcgttctggaaggaattctagctgggactgagtgccctgtagccagcctttacccactaaaccgccggagccgatagcgattttggattgaataatatggtagcccgcgcccaatggatcactttccggatccagcagcatcatgacgcggtcttgttggtaaccgtgcatcaggaagaaccaaagtatcgggataaagcaggcgaccagtacggcggcgatggcaatcaaacgccaactcattccggccaggaacagtacaaataatccggacgctgcgaccagaattgacgtcccgaggtcgggctgagcagccaccagcagggttggcataaagatcagaatgagtgcaataccagtattttttaatgttggcggacaaacgtcccggttcataaagcgcgccaccatcagcgggacggcgattttggctatttccgacggctggaagcgcacaaagccgagatccaaccagcgctgtgcgcctttactgatttggccgaaggcatcgaccaaaaccaataaaatcacgcaaacaatatacagataaggtgcccagctttcgtagacgcgcggaggaatctgcgccattacgatcatcacgcacaggccaatggcgatttggccgagcttgcgctccatcatgccgacatcctgtccgctggcgctccacatcacgaaggcactgtaggccagtagcgaaagaatgcagatcagaaacggtagatcgatatgcattttggaccacagagatcctttttgttggcgttcagtcatgatgtaccttaatcaccttcagtgccgggaggcgtcggtgccgcatccggtaattcagtattattatcacctaacagtatgtgatcgaggatctggcgggtgatagtccccacagcaggacccgcgccgccgttttccagaataatcgctacggctaccgtcgggttatcataaggggcaaaggccgtcatcagcttatggtcacgtaaatgctcggccactttgtgcgcgttataggtctcatagctgtaaacctgcgcagtacctgacttggctgccgctttatacggtgtaccttcgaaaaatttacggcctgtgccgttcgggcggttggctacgccatacataccgtctttcgccagttcccaaaagcctgagtgaatatcgccaatctggatctgtttttcctgacgataaggcaccagcacgccgtctactttggtatttagtagcaaatgcggatttttcacatcaccgtcattgattaatgtcatcaacgcttttgccatttgaatgggtgttgccgtccagtagccttgaccgatacctacgggaatagtatccccttgataccaaggttttttatggcgcttttgtttccattcacgcgttggcatgatgcccgcacgttcttctgataaatcaatgccggtatattcgccatagccgaatttgctcatccattcggaaaggcgatcaatccccatgtcataagcaacctgatagaagaaggtatccgctgattcttcaatggctttggtgacattcaggcgcccgtggccccattttttccagtcgcgatagcgtttttctgagccaggtaactgccaccaaccgggatcgaataggctggtatttttattgatcacgcctgcgcttaaagccgaaacggcaatataaggttttaccgtagaagccggcgggtaaacgccttgagtcgcgcggttgatcaacgggcggttcgggtcattgagcagaccctgataatctttgttggaaataccgtcgacgaacaggttcggatcatagcttgggttggataccagcgccagaattccgccggtgcgcggatcggtgaccacaaccgctgcgcggctaccgcttagcagttgttcaatataggtttgcagatgcagatccagcgtcaggtaaatatctttacctgcctgcggcggttgctcatgcagttgacgaataaccctgccacggttatttacttctacctcttcataaccggttttaccgtgtaataccggttcgtaatagcgttctatacccagtttgccaatatcgtgggtcgcggcgtaattggccagaatgccttctttatccaatcgctcgacgtctttgtcgtttattttggatacgtagccaataacgtgagtgagtgcggaaccgtaaggataaaagcggcgttggtagcctttgacttcaattccgggaaagcggaattggttaaccgcaaagcgggcgacctgaacttcggtcagcggcgttttgacagcaatagaggtaaagcgtcgggaacgtttgcgttctttttcaaagttcgcaatatcttcatcagtcagatcgacaataggacgtaatgcatcgagagtcgcttttagattctcgattttctctggcattaattcgagctgataaatcgtgcgattcatcgccaaaggaatgccattgcggtcatatatcatgccgcgactaggagcaataggaaccagttttatgcggttttcattagaacgggtgcggtaatcttcaaagcgaacaatttgtaaattgtacaaattggcgatcaacaccccgataagtaaaacaatacctagaaacgccacgagagcgcggcgcacaaacagggctgattcagccgtatagtcgcgaaaagggttacgttcttttttcatcccgctaaacacttactctggtcaaagtcaccacgttgctcaggctgatcacccgattattcccggtggtaaggatgattggtcgtaatactccaggcacgatacaggctctctgccaccagtacgcgcactaaaggatgaggtagcgtcagcggagagagcgaccagctctgctctgctgcggctttacaggccggagccagtccttccggcccgccaataagtaggctgacgttgcggccatcctgcttccagcgttccagctgatgggctaactgaggagtttcccagggcgtgcctgggatatccaaagtgacaatgcggttgtttttaccgaccgccgccagcatcagttcgccttctttttccagaatacgtttgatatccgcattcttgccccgttttccggccggtatttctatcagctcaaaaggcatgtctttaggaaaacggtgcagataatccataaagccggtctgcacccagtccggcatcttagtgccgacggctaccagttgcagtttcactctttagccccagagtttttcaagttcatacaggcgacgactttcttcttgcatcacatgtacgataacgtcgcccagatcgacaacgatccagtcagatacgccctggccttcgattcctaatggaatcatgcctgctttacgggattcttgtaccaaattatcggccaaagccataacgtggcgggtagaagtaccggtacagataatcatgcaatcggtaatgctggatttacctttcacgtcgatagaaagaatgtcttggcctttcaagtcatcgagcttgtcgataacaaattcttggagcgctttaccttgcaaaggttccccctcaggtgatttatgtccataaccttcgctgataatacgtttcgccggaatttcttctcagcacgcaatctgttacgagtggttatgatgtatttatcggcaggatgccgctgaaagccagctgtttactgcaattgctacaggggttttcagcgaatacctaaaattaagcggcgaagtatatcatgggactaaggctcgcgatataaaccctgtaactcgatgtatcgctgaattgcgcgcggtaacaggtcatcacagcttagtccttcacgtcgccgccggcgaatctccgtagcggatatatccaaaagtggagtatctgccagatagataaagccattgggttgctggctgagtttttctggttgcgtaacctgatgttgttccagccagttttgaagctcaggtgtatccagcttcttggcataaccgggacgagcgcagaccagcaaatggcaaacatccaacagcgattgccagcggtgccatttatgcagagataataatgaatcctgaccaatgataaaagccagtgctagttcgggaccgcgttccgcacgtagcgattccagcgtatctatggtgtaagacggcgtggtgcgctgtagctcgcgatcgtcaacctgaaatagcgggtttccctcaatggcgagctttaccatttccagccgttgttgcgcagaggcttccggctgtggccgatgaggcggaacgtgattaggcagcaaaataacctgctgtaatcggacttgctgcgccaaagcttccaccggacgtaaatggccgtaatggatgggatcaaaggtgccaccaaacagagcgtgtaagctacgctctggtttagcgctatcagcctgcttatccagcatcaaagaaactctcaggtaaggttttgccacagatcagcatggaaagtgactctaactcaggccagacagactgaccgtagtcctgcttgaggcgaatctccatttgcgttagcaaatgcacactgcgctgtaattgttgcaacgtgagacgctgaagcgcctgtgtcatcagatgacggcggttttgccagactttatgctgatcgaatagggttcttagcggcgtcgtcgccatttgccgttttaagttcagcagtagcaacagttcacgctggatggtgcgtagcaaaataataggttcgctatcttccaaccgcagttgctgcaaaatatgccaggcccgcttacttttccccgccagcaatgcatccagccaatgataaggtgtgaaatgcgccgcatcattgacagcttgttctacgcgcggcagggttaacttgccgtcgggatagagcagggagaggcgttccaatgcctgggataacgccagtaaattaccttcatagcaataacaaagcagttgaatagctgcatcatcgacttcgaggttgagacttttggctcgggtttgaacccagcgaggaagctgagcctgttccggtgtctggcagctgattaatgcgccttttggactcagagctttaaaccaggcgctgttttcctgcgctttggtgagtttgttggcacgcaatatcagaagaatatcggggtgtagcaggcttgtcagtttagctaactgttcgttcatagcggcggttaaaccactatcagggaataccagcagcagagtttggcggctggagaacaggcttagagcctgacaaatgctgaagatattctcccattcggtatgggtatctaacgctacggtgtaatgttcggtaaaaccttgctgcgatgcagcctgacggatgcgatcctgactttcctgtaacagcagcggttcgttcccacacagcagataacaagcgcgcagcccctcttggagctgcgcggcgagttgttcaggataaatacgaatcattgggcagaggcaactggagtcactgttttggccgtagccggcttagcgtcttcttcctgtgcctttttcacttcttcagcgtgtacggtcagtaatttccgcactaactgttgagcggcctgctcacgcatttcctgcgcaatgatgtcactttctgccgtttttgctaacgcggttaacgggttatcaaagaaggagcggaaaacggtcacattcaacgggtaaatatcgtgcccaggaatcagcacctgcgcctgaacattcagtaccatttggtattctgcggtcacgccgttctggaacaccgaaacggtgtcctgactttgcgacgatcccaaaatacgcagcgtcggcagatccttgcgcatcgcatcgtcaacaatggagacgttgcttagacgcagctgttgacgaatagagcgcgtcaatggcccataaggatcgctgctttgcagcaacattttttgcagttcctgaggcacttgtgtagtgccccgcagatgaaaaccgcagccagcggtgaccagcaccgctaaccccagcaacagcgtcagaatacgatgtcgcacaactcctccttgtcttaacctacaaccaggttaagcagtttgccagggacatagatcactttacgaatcgtaaccccatccagatattttgccaccagacgctcctgacttgcgcactcgcgtacgtattcttcagttgcatcggctggcacggtgatcttgccgcgaaccttgccgtttacctgtaccacgactaacttggaatcttcaaccatggcctgctcatcagccattggccaaggagcggtatcgatatcgccttcgccgcccagttcctgccacagagtgaagcagacgtgaggggtgaacggatacagcatacgtaccacggccagcagtgcttcttgcatgaaggctcgatcctgctcggtttcctgcggcgcgcgacccagtttgttcatcagctccatcacggcggcaatcgcggtgttgaaggtctgacggcggcctacgtcatcggtcactttagcaatggttttgtgcaaatcgcgacgcagtgatttcagatcttcagtcaggctggcgatatccagcggctgtgtagcccctttgctggtgtgttcaaacaccaaacgccatacgcgcttcaggaagcggttcgccccttcaacgccagattcctgccattccagcgtcatttctgccggagaagcgaacatcatgaacagacgaacggtatccgcgccgtatttttctaccatgacttgcgggtcgataccgttgttcttcgatttcgacattttgctcataccggcataaaccagttcatggccttcgccatcaacggctttagtaatacggcctttgtcatcacgttcaacaatggcgtcaaccggagatacccagatacgctcgccgttgctaccggtgtagtagaaggcatcggccagaaccatgccttgacacagcagacgcttggctggttcatccgaatccaccaaacctgcatcgcgcatcagcttatggaagaagcggaagtacatcaaatgcatgatggcgtgttcgatgccgcccacatactgatcgaccggcagccagtagttagccgcagccgggtccagcatgccgtcatcatattgcgggcaagtgtaacgcgcgtagtaccaggatgattccataaaggtatcaaaagtatcggtttcacgcagacccggcaatccgttaacagtggtttttgcccactcggcgtcggctttgattgggctggtaatgccgtccataaccacgtcttcaggcaggatcaccggcagttgatcttctggtgttggaaccacggtaccgtcttccagcgtgatcatcgggattggcgcgccccaatagcgttgacgggagacaccccagtcacgcaggcggtagttcactttgcgttgacccacgccaagcgcgaccagtttatcggcgatagcatcgaaagcagcttgataatccagaccgtcgaattcccctgaattgaacaaagtgcctttttcgggcagtggcgcagcgctcaaatcaggcgcggtgccttcggcggtcagaattaccggctgaattggcaggttgtatttggtcgcaaactcccagtcgcgctgatcgtgacccggaacggccatcactgcgccagtgccgtaatccatcaatacaaagttagcgacccagatcgccacttcttcgccagtcaacggatggatagcagacaggccggtggccatgccttttttctccatggttgccatttcggcttcggccactttggtgttacggcattcgtcaacgaactcggccagcgccgggttggttttggctgcttctagcgccagcgggtgaccggcagcaacggcaacgtaggtgacgccaaagaaggtatccgggcgggtggtgtaaacagtcagtttttccgcactgttagccacgtcaaaggtgatttccaccccttcagaacggccaatccagttgcgctgcatggttttcacctgctctggccagctttccagcttgtccagatcgttcagcaactgatcggcataatcggtgattttgataaaccactgcggaatttctttacgttcgactttggtatcgcaacgccagcagcagccgtcgataacctgttcgttagccagaaccgtcagatcgtgaggacaccagttcaccgcggaggtctttttgtagaccatgcctttttcatacagcttggtgaagaaccactgttcccaacggtaatagtcaggtttacaggtggcgatttcgcgatcccagtcatagccgaagcccagcagtttcaactggttcttcatatattcgatattgtcgtaagtccacggagctggcgcggtgttgtttttaaccgctgcgccttcagctggcagaccaaatgcatcccagccgataggctgcaggacgtttttacccagcatacgctggtagcgcgaaatcacgtcaccaatggtgtagttacgaacgtgacccatatgtaggcggccagacggatatggcagcatagagagacaatagtatttctctttgctcgcgtcttcagtcactttgaaagtttgcttcttttgccaatgaagctgaacgtgcgattcgatatcttccgggcggtattgctcttgcatggcagccaatggtcctatagtgaaaacagctacacctgtagcatcatctgtttaatatcataaagtgagatccgcatagcatagctgataagcggcagccgcaacaacactctacgggtcactgtcgcgtttttctgcgcgacctatagcatttacgggcagagtgaggacggtcacaccctaatgatcgcgtgacatcaggtatttacggctaaaataaatagagatacctttaattatcaggcgaaagataagctttatcacaggttactcgaggagactgtatgaacaaggtggctcaatattaccgtgaattagtggcatcgctgaccgagcgcttgaaaaatggagaacgggatatcgatcaactggtcgccagtgcggaacagcggctgaacacggtagaagatttaacgcgcagcgaagtcgatcagattactcaggccgttcgtcgggatctggaggagtttgctcgtagttacgaagaaagtaaggaagagtttaccgatagcgttttcatgcgggttatcaaagagagtctgtggcaagaattagccgatattaccgataaaacccagcttgaatggcgcgaagtgtttaaggatgtcagccaccacggggtttatcacagtggggaagtggtcgggttaggtaatctggtttgcgaaaaatgccaccaccacttagcgttctatactccggaagtattacctctttgcccaaaatgcggtcacgatcagttccaccgtcgcccattccagccataaccttcacttctagacactccgcctgcgcggagtgtcataaaaccattattttccgtagcgagacacgcgctcaaccagtaaatcaataaaaccctgccgatcaatatccatcaatatttgcgtattggccggttttcccgtcaattgatagaaatccgttaccgtcatgccttgcgtgtatttgccctgagtctctattccaacccaacggtcaacgctttggaacagctcgggagccaagagccaggcaatggtgcaaggatcgtgcagtggcgcacctttaaagccccagcgttcctggcgatgataaagcataaagaaatctaatagaccggcaaccacgtcggccaccggattgccaagctgacggaaacgttcaatatcctcgctcattacctgcgctttatgggtgacatccaacccggccatggtcagaggaatgccggattggaatacccgttcggcggcctccgggtcgacataaatattaaactctgccgctggcgtccaattgcccaacatcaccgagccgcccatgatcacgatgcgttcgatttttggcgtcagttcggtgtgactggcgaggaataaagcgatattggtcaaaggacccgtggctaccagcgtgacgggacgcgggctggcgcgcagaactctggctatcagttccaccgcattttccgcttgcggcgcaaaatctggctcaggcaaaaccgggccatccagcccactttctccgtgtacgttatcggcgatgataagttcgcgaagcaaaggtttttgcgccccaccggccacgggaatatctcgacgtttcagcaaagtcaaaatgcgcagtgcattacgcagcgttttttccggtgtttgattaccggcgctggtggtcacagctgcgattttcagttcgggggaggcgagagccagaatcagtgccatggcatcgtcatggccgggatcacaatcgataataatagagcgggacatagggtttcctcttgttgtttctatttgttgtcgacaatggacaaaatagtcaaaagaggcaataaacggcactgaaaaacaagaggggatatccgaatcctcccccgaaagggaggataattattggctaggccttagtgcagaatcttggcgaggaagtctttcgctcgctcagatttaggattgttgaagaaatcgtccttattactgtcttcgacaattttcccttcatccataaagatcacccgatgcgccactttacgggcaaagcccatttcgtgagtgactaccatcatcgtcatgccttcgtgagccagtttgaccatgacgtccaacacttcattgatcatttccggatcgagcgccgaggtcggttcgtcaaacagcatggcgatagggtccatgcacagcgcacgggcgatggcgacgcgttgttgctgaccgccggaaagttgagatgggaatttgtcggcgtgagtcgttaacccgacacgttccagcagttttagccctttttcccgcgaggcggctttatcgcgtttcaatacttttacctgcgccagcgtcaggttttcgatgatcgataaatgaggaaacagttcgaaatgttggaaaaccatgccgactttggaacgcagctgagccagattggtgcctttatcattcacggcgataccgttaactaaaatattgccttgctgaataggttccagcccgttgacggttttaatcagggtggacttgcctgagcctgaaggaccgcagactaccacgacctcaccttttttaacttcggtggagcagtcgctcaaaacctgaaagtgaccataccacttagaaacatttttcagggaaatcatcaaacagtccttttcttcaaatagttaaccagcatcgacgccgcaatactgataacaaaataaaccaaaccggcgaacagaaccatttcgacctgagtaccgtcacgctcaccgatggtggtcgcggtgcggaagaaatcggccagactaagcacatacaccagcgatgtatcctggaatagcacgatgccctgagtgagcaagagcggaaccatcgccctaaatgcctgaggtaaaataaccagacgcatcgattggccttgggtcatccctaaagccagggcggcggatgattgtccgcgggaaatgctttgaattcccgctcggataatttccgagtaatacgccgcttcaaacagggaaaaggctaccatggctgagatcagccgaatatcggtttttggcgatagcccaagcacattttgtaataagcttggaaccactagatagaaccacagcaataccatgactaaaggcactgaacggaatagattgacgtaaagggtggcaaaccagctgatcgctttgatcgacgacaaacgcatcaccgccagtatggtgccccacagaatgccgaaaacgatagcaataacggtaattttggccgtaacggccagcccttgtagcaaataaggcatgctgggcgcgatggaactccagtcaaattcgtacattatttactccccaaattgccgggtaactgcactttcttttccaccaatcgcataatcagcatgataacggcgttaattaagacataagccaacgtgatagccgtgaaggattcataggcatgcgcggaataatccagcagtttaccggcctgcgccgccatatccaccagacctatagttgatgcaatcgccgagttttttaccagattcagcatttcggaagtcatcggcggaatgatgacgcgataggcattgggcaataatacatagcgataggtttgcggcagagtcaggcccatcgccagcccggcggccttttggcctcgcggcagggattgaataccggctctaacctgctcacagacgcgagccgcggtgaacagcccaaggcatagcatggaagaaaggaaaaactgtatattcgggtctagctcagttttaaaccacatgccgatatgggtcggcagcagttcgggaaccaccagataccaggtaaagaattgcacaatgagcgggacgttacggaataactccacgtaacaggtaccgattgatgacagaagccgattggggacggttcgtaaaataccgaacagggaaccgacgaaaaaggcaataacccatgcgctcaacgacagcgcaaccgtgacctgaaaaccagaccagatccagcctaggtaggtggtgttaccgaatggggcgggttgaaggaaaatcccccaattccagtctatagacatagctaactcccttaaaagggtggagaaaccaccctgaagactgatgatgaatagccgcaccgcgctgaccaaaaggaaacaaaaaaatgcggagtggggaacggccaccccgcatcctgtctaccaagcggtcatcatcaatcaccaggacagcgtactgccccggatattatttttagttcaatgccttgtcgttaggttctttgaacagctttttcatgtcatcagacagagagaaattcaggttcagatttttcggcgggataggctgcgtgaaccagcgctcaaaggatttggttgctacgccagaagtttgcgcgttggcaatggtttcatccattaacgctttaaactgcgggtcatctttacgcaacatacacccgtaggcttcctgagattgcggtgtacctacaatctcccaatcccctgatttcttggctttggcgcgttcaccggccagcagagcgtcatccatcataaaggcgacggcgcggccgctttccagcgtacggaaggaatcaccgtgatctttggcgctgataatgcgcatgttcattttgttttcttcgtttaatttgttcagcagcacttcagaagtggtaccggaagtcactaccacggctttaccagccaagtctttgaaatctttaacaccagagtcttttttggtcagcaaacgggtgccaaccacgaagatggtattggagaatgcggcctgtttctggcgctcgacattattggtggtggaaccacactcaaaatcaaaggtgccattttgcagcaatggaatacgattttgtgacgtcacgggaatcagcttgacctgtaaatccggcagattcagttttttcttcaccgcatcgacgatcaggttggagtagtcctgtgaataaccgaccactttctgctgattatcgtaataagagaagggaacggaagactcacgatggccaacgacgatcacgccgttatctttgattttcttcagcgtgccagccagttcttccgcatgggctacgctacttgccattccaactaacagtagcgataacgccagtttacgcatttgcatggtccaactcctgtgatgttatggtgctgcttgatgttgtgatgctgaaatcgtcttatctgaattgggtatatgacgaaaaaatcattaccgctttattaacgagcgatctcttcacttacttgtaacagattatcgcgataaaaacgtatcttgttatataaatgatattaaaatgtttgctttttgagacggaaatcgcaccaaataaaggcaattaaacaaagatgcaccaagttcgtgctgtaaatgcgctaaatttgtgcaataaaacggccagccttggctgagaataagaaaaccgaggaataacgaccagaatcacaaggaatattgcaaggcgtgtgccaattgtggctctcccgcgggaaacgggagagaaaatgcgggaaaaggcgactattcggttggagtgatctgttgggtaatagctaaatgggctttaaacacctccagcgccgatggaagctgttcttttttgagctgtttttccgggttccacagctcggcaaaagtaatggctcggccacagtgaataaagacttcggtaacctcgatcaccagaacgctgcgcgcgggctgcccattttgtgcaaagcggttgcacagttctggatcaacgctgatcttagcgcggccatttactcgaaaaccttcattccagccgggaatcaggaacaaaataccgaggaatgggttttgcagcagattacggatgccgtccagacggttatttcctgggcggtccggaaataataaggttttatcgtcttcaacatgcataaaaccgggttctcctcccttaggtgaacagtcaacgccgttggcaccaaaggtacctaaaatggcgaagggagaagcagcgatcagctttcgggcatagctatcgagatgatcaatctgcttttgcaccacgtttttattaggcgacgcatagtgctgactcaactgatcttcagttgtcaggataaattctggattcagttgcatacagtctcagttaatgattatgctaattattcgtattgatgagaacgataacagccgccatgccaatgcgcaatattaacgcaatacgggtaataaggccgcaatccgcttaaacagcgctattttgatacaaatttagcaaacatctcgtgccgtaatggcgttagcttgatgaaatttttgatgtttgacggggaaatgaatcgccgcaacgcagagatgctgcggcgattttttacgttgaatgaaccaaggatgcgttcggatcgattaattcttacctgaacgcgcgacgaaacccagtgtgatcacaccgaaaatcagcgtaatcacccagagtggccagccgccaaaacgggcataaggcgtcagaccggtggttggtgtcactttcacttccagcacctcgcgcgtgaactgcgggatctgagccaatacgttaccgtcagctcccaccgcagcggtgacgccgttgttggtgctacgcagcagaggacgacccagctccagcgctctcatgcgcgccatctggaaatgctgccatgggccgatggaatggccaaaccaggcgtcattggaaatggttagcaggaaatccgaattcgctttgaaattatctctcacctgttggcccagaataatttcgtaacaaatcgccgccgtcatatcaaaaccggctacggtgacctgtggttgcacatagctaccgcggctaaatgaagacattggcaggttgaataagggtgccagtggccgcagcagggcttccagcgggacatattcaccgaaaggcaccagatgatgtttgctgtagcgatttagcgtcggatattggtagggctctttatcgccgagcacaatcaggctgttaaagaaacggtagccatccggcgtattgcgagcgtcaacaataccggtaatcaggctactgtgattggcgcgcatcaagctgtccatcatggtcaggaaggcagtttgatcggtttcaatatcgggaatagcggattcaggccagataataatcggcgctttgcccatataaggttggctggcattcaaatacacttgcagggtatcgatcagtgccttcgggtcccactttaacgattgagcaatattaccttgcaccatcgccacattcacagcgcgttccggctgaggggtaaaccagtgccattggcgcagcggccagggcagcagcagtaatgccgtagcaataaccgctggcagccagcgtcgctggtggatcgcataagccagtaatccactgatggcgaccagaataaaggtaacgccatcgacgcctaaaatcggcgcaatgcccttcagcggcccgttaatctgggtataaccgaactgtagccaagggaaaccggtcagcacccagccgcgtaaaaactcgctcagttgccataagacaggcgcggcaatggctaagcgccaccaggtaggtttcgggcacaggcgggttagcgcaccggcaaacagcatggtgtagagcgacaaataggccgccagtaacactaccaggaataggttgaccatcgtcggcataccgccaaattcggcgatagtgacataaacccagtttacgccagtgccaaatagccccattccccagataaaaccgataaaggcagactgtcgagtactgcgatttaaagtcagactgagtaaaccaaacagggataccagcgaggctggccagaaatcgaagggggaaaatgccagcgtaccgctggcaccaaaaaacagcgccagtagggcgcgaacccactggcgattgaataacgaagcgttagccatcgagaatttattcttccaatttcggttgtggtgcatcatccgggattttaacgtgaacctgaataatacgtcggctatcagccatggcaactttgaataaataaccttcaatttcaatggtttcaccgcgcgcaggcagatgaccaaaggcttgcatgactaaaccaccgatcgtgtccacttcatcatcgttaaaatgggtattgaacacttcgttaaaatcttcgatttgagtcaatgccctgatggtgtaggtatgacgactgagctgacgaacgtcgcgatcttcttcgtcatcgtactcatcttcaatttcgccaacgatcagttccagaatgtcttcaatggtaaccagcccagaaacaccgccaaactcatcaatgacaatcgccatatgataacgttgggagcggaattcctttagcatccggtcgacacgcttgctctccggcacgacaactgccgtccgtaacactttgtcgatgctgaacggttcggaatctgtgcgcataaacggcagcaaatccttggccatcaggatgccttcaatgtgatctttatcttcactgatcaccgggaagcgggagtgggcggattcaataatcacatccaggcactcatccagcgtttggttacgcttgagtgtgaccatttgagagcgagggatcataatatcccgcacgcgctgctcggcaatgtccatgacgccttccagcatgtcacgggtatcgggatcgatcagatcgttctgttctgagtcacggataagctcgaccagatcgccacggtttttaggttcgccgtggaacaattggttaaggataagagtaaagaaccctttcttgggactggggctatcattgttttgtgaatggtcgtcgctcatggcgttttagttaagtttactcatgttaagtattgtcattatcagcagcgtaaatagcacgctgccaacgcattattcggggtctttttctgaaagatacgggtccggataacccagactttgcatgatttcagtttcaatcgactccatttcttcggcttcgtcatcgacgatgtggtcataccctagcagatgaagactgccgtgaacaaccatatgcgcccaatgggccaatacggctttattctgttcaacggcttcctgttcaaccacttggcggcaaatgatcaaatcgcccaacagcggcaattctatttcaggcggtgcttcgaagggaaaggatagtacgttggttgacttatctttaccacgataggtcaaattcagttcatgactttccgcatcgtcaaccactcgaatagtgacttcagactcttcctgaaactgaggcaatacggcttccagccagcgttggaagtcggcttcagttggcaaaccctgactgttttcacaggcaatctgtaaatctaatataacctggctcactgagcctcctgctctgacggggtgtggttttcacgcttgcgttgctcggcgctggcgtctttacgtttttgttctgctgcttcccaggcttcataggcgataactacccgagccaccacaggatgccgcactacgtcttcactgtggaagaagttgaagctgagttcctctacgtccgacagtacttctatggcatggcgcaaacccgatttctgatggcgaggtaaatcgatttgggtgatatcgccagtgatgaccgctttggagttaaaacctattcgggtgagaaacatcttcatctgttcgatagtggtgttctggctttcatccagaatgataaacgcatcattgagcgttcggccgcgcatataggccagcggcgcaacttcaatcacattgcgttcaatcagtttttctacgcgctcgaaacccagcatttcaaacagggcgtcgtaaagcggccgcagatagggatcgactttctggctgagatcgccgggcagaaagcccagtttttctccggcctcaaccgccggacgagtcagcagaatacggcgcacgttctgtcgttccagcgcatctaccgccgccgcaaccgccaaataggttttacccgtaccggcagggccgataccgaaagtaatatcgtggtcgagaatattggcaatgtattgcgcctgatttggtgtacgaggcttcaccatgccgcgcttggtgcggatatttaccgctttaccgtaatcggggacgctttctgccgtttgctccagcacccggctttctttcactgccaggtggatgtgttctggatcgatatcaggaacgacgccgcgaatcggtgcggtgtctacgtagaggtggcgcaggatttctgctgccgcattgacgcagatgttcttaccgaccagcttaaaacggttatcgcggcgattgatttcaatgcccaaccggcgttcaagctgtttgatgttgtcatcaaaagggccgcacaggctcagcaaacgctgattgtcggtgggctcaagcaggatttcttgtgtcgttacgtgcaaattgtttctctgagtcactgagtttctctaggtcacgtcgggccggttgatattgattcacataaggcgagtatttcttttccgttatgcctgatatcaataatacatgtcattccggaattattcatggtgagcgcagtggacgcaagcccactgcttgtctatctgtgcgatggtgcgcaaaaatcacgcgtcccacgggctgatggccttcaatgattcagtttgtgaatttttgaaagaaaatcatcaaaagtcattgggtcagactaagggtggtattgcactacgccaaggtcattttccttgcgggtacgggcaatcaccgactgcggcgattctacgctgcgtaaatccatttgatcttcggtccgtaccaccacgccgcgcagagagttggtgtagacatcaacaatgtcgacatcgacgaatttaccgatcatctccggcgagcctgcgaaattcacaatgcggttattctcagtgcggccagccagttccattacgtctttgcgtgaggtgccttccaccaatacccgctggacggtgccaatcatcgcctggctgaaattcatagcctgctgagtaatacgatcttgcaaaatatgcagccgctgctttttctcttcgtcggaaacatcatccggcaaatctgccgccggcgttccgggacgtgaagagtagataaagctgtagctcatatcaaaattcacttccgcaaccagcttcatggtttgctcaaaatcggcctgagtttcaccggggaaacccacgataaaatcggagctgatatgaatatccgggcgagccttgcgtaatttccgaatgatagatttgtattccaacgcggtatgggcgcgtttcatcatggttagaatacgatccgaaccgctttgtaccggcaaatgcaggaagctaaccaattcaggcgtatcttcatacactgcgataatatcatcggtaaattcgataggatggctggtggtgaaacgaatgcgatctataccatcaatcgcagctaccagacgtaacagttcggcaaaactacagatattgccgtcataggtagccccgcggtaggcattaacgttctgaccgagcagattgacttcccgcacgccttgagccgctaactgagcgatttcaaacagcacgtcatcacttggccggctgacctcttcccctcgggtgtaaggtactacgcagaaggtgcagtacttattgcagccttccatgatggaaacaaaggcggtaggaccttcggcgcgaggttccggtaaacggtcaaatttttctatttcagggaaactgatatcaacaatcggacttcgggttccctgaacgtggttgagcatttccggcaggcgatgcaaagtttgcggcccgaaaataacgtctacgcaaggcgcacgctggcgaatatgttcaccttcctgagaggccacacagccacccacgccaatgattaactgcggattggtttctttcaactgcttccaacgccccagcagcgcgaagactttctcctgcgccttttcgcgaatggagcaggtattgagcaacagtaaatcagcttcttcaggcacatcggttaactcataaccgtgcgtgctggccaggaggtctaccattttagacgaatcatattcgttcatttggcagccccaggttttgatatggagtttttttgtcattgggttttattttgctccgagcggtgtgaatagcgcaaagactgagttcttgtggggtattgtagtcatttggccggagtgaaaccagtgcgggaagtctgagttaacctgcagtgttaaggaaaaatccggtacactgacgtcagaaaaaatgcccaaaatggtgggcgtaacctcaattttttgaagcgtagccgaaatgaaaaaatctcaacaaagttacgatgttgtcgtggtagggggcggaatggtcggtgcagcagcggcattagggctggcgcaacgcggctggtcggtggcgctactggagcatgaagcaccgccggtatttgatagccaaagcgcgccggatctgcggatttccgccattggctgtacctcggtaggcttgctaaagcagctgggggcctggcaacgagtgcaggaaatgcgttatgccccttatcgtcgcctggaaacttgggaaatgcccggctctaaagtggtattcgatgcggcatctttgtcactgcccgaactgggttttatggtggaaaatcgggttttacagttggcgctgtggcaacagatcgatgagtgcacaaatttaacgctactgtgcccgtcacgcttacaaagcatggtaagagtggaacaacattggcagctcacgttagacacacaggagcagctacaggcgcgtttggtggtaggtgccgatggggcgaattctctggttcgccgtttagccggtattggcaccagcggctggcaatatcgtcagtcttgtatgttgattaccgtagataccggcgcgccggcgcaggatgtaacctggcagcaattttttccttccgggccgcgagcgtttttgccgttgtttgataattgggcttcgctggtgtggtacgacagtccgcaacgcatccgccagttgcaaagtctgcctctggcacagttgaatcaggaaattgcagccgcatttcctgagcgtctggggcgagtgaatgcgattgccgccggttccttcccgttaacccgtcgtcatgcgcaacgctatgtgcaatcaggattagtgttgttgggggatgcggctcataccatcaacccgctggccgggcagggggttaatttgggctatcgcgacgtggatgcattgctggatgtgatgaatgaggcgcgagagttggccgagccttgggatagcgaaaccgtattgctgcgttatcaacgtaaacggcgtaccgacaatctgatgatgcaaagcggaatggatttattctacaccgcgttcagcaatgatttaccgccggtgaaaatggtccgtaatctggcattgattgccgcccagcgagcaggaaaattaaaagaacatgcgttgaaatacgccctgggattataacaatctctttccgagcggcttatcaacaacagataggccgctgaaccctcgaatatttcccgctggtttctctaacttgttcgttctgcgaaccatccagtttggataatttatcaaaaacagaaaagcaaaaagcccgccgaagcgagcttttctaaatatggctggggtaccaggattcgaacctgggatgctggaatcagaatccagtgccttaccgcttggcgataccccaaaagatggtggctacgacgggaatcgaacctgtgaccccagcattatgagtgctgtgctctaaccagctgagctacgtagccatctttaaatcttttaaaacaagaaattgtatggctgggataccaggattcgaacctgggaatgccaggatcaaaacctggtgccttaccgcttggcgatatcccaactgatatacaattctttttaatcacaacttaagtttgacagtattccatttcagagaaatggctgggataccaggattcgaacctgggaatgccaggatcaaaacctggtgccttaccgcttggcgatatcccatctactgtgacaaccgatgaaaatggtgcgggaggcgagacttgaactcgcacaccttgcggcgctagaacctaaatctagtgcgtctaccaatttcgccactcccgcatacatgaaaaaagatggtggctacgacgggaatcgaacctgtgaccccagcattatgagtgctgtgctctaaccagctgagctacgtagccatcttttttctgcacaaccttcatcggcgttgcggggcgcattatgcgtatatggccgatttgcgtcaactagttttttccctaaaaagcgctgaaagggttcgtttgtttggcttgtgaacagtctggcgataaattaggcaattatagagattcattgttgaattttacgacaaaataaaaggttaaaagcggcaggtctattgacttgcgggggaattaagtaagcgaattttcggtgaaagaaacaggacgacccaaaggccgccctgttgaacgctattgacgaggttcgctgcgctgaatgaggcaacagaaaccgcaaactatgacttatatgcatcctgatgcacgcctacggcacggccggatgggtcatccatatttttaaaggattcatcccactcaatggcttttgctgatgaacaggccactgatggtccgcccggcacgcattccgctgcgcttggcagtgggaataactcttcaaagatcacgcgatacaaataagcttctttcgaatttggcgtgttgtaagggaaacggaaatgagcggtttccagttgttgatcggtaacttgctctgccgccattgcttttaacgagtcgatccagctatagccgactccgtcggagaattgctctttctgacgccaggccacgctgtgaggcagatccgcagagaaacattcgcgcagaatatgtttctccatttttccatttccgcacattttatcctgcggattaatacgcatcgccacgtcgaggaagtttttatccaggaagggcacgcgagcttctacgccccaggcggacatagctttgttggcgcgagcgcagtcatacatatgcagagccagcaatttacgtacggtttcttcgtgcaactctttggcatttggcgctttatggaaatagagatagccgccgaagacctcatcggaaccctcgccggatagaaccatcttaatgcccattgctttgattttacgtgacatcaaatacattggcgttgaggcgcgaatggtcgttacgtcataggtttcaatgtgataaatcacatcgcgaatcgcatccagcccttcctgcacggtgaaatgaatttcgtgatgcacggtgcctaaatggttcgctacttcctgcgcggctttcagatccggcgatcccaccagaccgacggcgaaggaatgcagctgcggccaccaggcttcgctacgctcatcgtcttctacccgacgggcggcaaatttcttggtaattgccgaaattactgaggaatccagcccaccagaaagcagaacgccgtaaggcacatctgacatcaggtgagttttcaccgcttcttccagcgcgttggccaactgatttttatcggtaacgttgtcttttacattttcgtaatcgaaccagtcacggtggtaatactcgcgaatttctccgtcctgactccataaatagctaccggcagggaattctttaatcgtgcggcataccggaaccagcgctttcatttcagaagccacgaacatattgccgtgctcatcatggcccatatacagcggaataatccccatatgatcgcggccaatcaggtacgcgtttttctcggcgtcatacaggataaaggcaaacattccttgcagatcgtcaaggaaatcagggcctttttcctgatacagcgccagaatgacttcgcagtctgaaccggtctgaaactcaaagtggtcgccatactgttgacgcaacgcctgatggttataaatctcgccgttaaccgccagcacatgagtacgcgcggtgttatacagcggctgagcacctgcgttaacgtccacaatagacaaacgctcatgggctaaaatagcgttatcaccggcataaatcccggaccaatccggcccgcggtggcgcatcaatcgcgacatttccaatgcagttttgcgtaattcgattggatcggtttttagatcgagcaccccgaaaatagaacacataattatctccctaacttctttagcctgtggcggtgatgatgttgatgttgtgtttgtcgttacgcttgggtggaacgactccatccccttaatttttcacgctgcaatatgaaatttttcaggtatgtaacgacgagtaataagaaaaatatgcaaaaaacacgccaatatagaaggttgttgttttgtgaattttggcggtgtggaaaatatgcattacaagaaaatgcgccaaaagggggagttaatgcaagaactttggtgcaacgcaccaaaaaagggaatccctggcatttttcacgccgcagcggcgttggcgctttcgcccccctaatcacttagttggctaatggattcatttcattgccgccttgttgcaacacgaaatccatgggggagtggatgaatttgaactgttgataaagctaatgattagggcgaatgtggtgatgggatcgtagtggcgtgagccaccggagcccccttgttgcggtaggcccgggtaactcgaacggttacattgttcagatcaccgtggcattgagtgctttcttcaacccgtccttgaactggagtgagcgttcaggaattgagagtgataggcgattaacggggctggtttctaggcaaaatatggcaatggactgtattgcaataacgaataaaagaagtggcggctgctttgccgccatcatctttaggaatgcttagataatatctatatcttctactgatggataaacgtagcttggacggaaaggcatagcctcaatgtcgtccagcgttgaaacaccggacaaaaccaaaatcgtttccaaaccggcctggaagccagccagaatatcggtacgcagattatcaccaataatcacggtattttccgaatgaccctgcatcttattcagcgcagcccggataatccacgggctaggcttgccgacgtaaaacggcttacggccagatattttctcaatcggcgcgcaaagagcgccgcaggccggtgcaaagccgcgcgcgtgggtatccggattggtcgcgataaaacgtgcgccgttggccacgaagaacgccgccttatgcatcatttcccagttgtaggagcgggtttcacccacaatcacaaagtcaggattgatatcggtgatggtaaatcctgctttatatagctcgtgaattaatgcgccttcgcccaccacataggcttttttaccttcctgacgtcgcagaaaatctgcagtagccattgccgaggtataaaacgcgctttccggcacttccagccctgcagccgcaaagcggttagccagatcctgagcggtttgcgaagggtagttagtgaggatcaccagcggcattccctcatgctgaattcgagccagaaaagcgtcagcaccgggaacggcggtgttgtcatgcaacaacacgccgtcgatatcacagataacgtttttaattgtcattgttttcattactcattagcacggcaaggtgccactataacatgcaggctaaaggaatgagcaggcagataaacggaaacttaatgccgttcagctgccgaaaaagtgaggaatcagttttcgagtaaacgctgtaatagaacgccgttcagcatggcgcgtttggccaaggcgaaagcgccgatagcagagccatggtctaactgggaagtcaccaccggcagatttttgcggaaatcttttagcacctgattgttgatgcagctttgaatcgccggtagcaacactttttcggcttcgattatctcgccggcaatcaccactttctgcggattaaacaggttgatcaccatagaaatggctttgccgaggtaacgacctacgtgctccagtacctcacaggccaacagatcaccgcgattgctcgccttacaaatggcgctgatattgcagtcttccagcgtaagtttgctcgcatagccttgagtcaataagtgacgcacccgattttcgatggcggcgttggacgccacggtttccagacagccaaaattaccgcagtagcagcgttcgcctaaaggatcgatttgaatatggccgatttcaccgacgtttccgttgctgccgaggaaaatctggctgttaacaataataccggcaccggttccgcgatgcagacgcaccaatacggagtcttcgcagtctttggttgcgccaaagtagtgttccgccaaggccaaactgcggatatcgtgaccgacaaaactgggcacgttgaaacgttcttgtaaattgtccaccaacggccagttatcaacactgatatgcggcatatagcgcaccacgcctgtatcaggatcgaccagacccggcagaatgaccgcaatagcaatcagttcacgcagcttgcgctgaaattgctcaataaactggctgatgatattaaacagcgcgtgttccagcgtttcttgggtacgttccggcagtgggtaatgttcttcaccgagagattttccgctcatatcatacaacgtgatagttgcgtcatggcggcctaaacggacggcaatagtatggaactggcggttttccgttacgatagaaattgcgcggcgaccgccggtggaggcttgctgatcgacttctttgatcagcccacgctccaacagctggcgagtaattttagtgacgctggcaggggcgagatggctgagatcggctatttgaatgcgcgatatcgggccttgctggtcaatgagccgataaaccacggcgccattgagttgcttcacaagatccacgttgccaatttgtgcctgtccgccggtgctcatcaataaatttactcgctttgtgtcaaacttcgttgccgttaacgatagttttggtgattttataatcgcgggtaaaggcagtcaggttggccactttgccgatttcaatgctccctaactgcttctccacgccgatagcgcgggccgcatacagtgttgccatgcgcagtgcttcatccagtggaatgcctacatgctcgacgctattttgcacagcttcaatcatcgttagcgcggagccactcagggttccgttttcatccacgcatagtccatcgcgatagtatattgttttgcccgcaaaaatgaactcttcaatgtcagcaccggctggcgctgtggcgtcggtcactagcaccaacttctcgcctttcagccgtttcgcgttgcgaatactggcccaggcaacgtgatgaccatcggcgatcacgccggtatacacttctggcgtgtcgaagatcgcacccatcagacccggttcgcggccagtgatatatggcatggcattatacaagtgggtcgcaaaactgatacccgcgccaaaaccgactcgcgcctgctgataagtggcattcgagtgaccggcagaaactataatgccagcgtctgccaactgacggatatatttggcttccaccatttctggcgccagcgtgaccttggtaatgacgtccgcattggcacacagataatcgatcattgccgcatcaggtttacgaataaatgctgggttatgcgttcccttttttaacgggcttaaataaggtccttccagatgcaggccgagagcctgattctgatgtttttccagataggcacgcatcacattgacggcgtgcttcatataatcgtcgctgcaggtaatcagcgttggcagatagctggtacagccggatttctcattggcacgctgcatgatttccagcgtctgttcggagatagcttcaagagaatcgttaaactgcacgccaccgcaaccattcaattgaacatcgataaaaccgggggctaggatggcgccacccagatcgcgctgttcgatatcggcaggcacttcagccagcggacaaatgcgttcaatcaaaccgtcagccacgactacagcgtgattatccagtatttcatggccggtataaatgcgaccgtgtgttaaagcatacatcggagccccctgagactattaaagatctttaacgttttctgcttctaattcagtgaagtattttacggtttttactttcaattccatagtagaagcttcgtcgcacaccatcacggctttggcatgcagttgcaggcagctaatggtccacatatggttgatattgccttctaccgccgcttgcaacgccagcgctttagcgtgacctgtcaccagaatcatcacttcttccgcgtccagcaaagttcccacaccgacggtcagtgcgtatttaggcacgaggcttgcatcgccaccgaagaagcgggaattcgcgatgcgagtttcctgcgtcagggttttgattcgggtgcgggaggccagtgaagaagccggttcgttaaacgcgatatgaccgtcgttacctacgccacccatgaacaggttaattttaccgtaggacttaattttctcttcgtaacgacgacattcttcatccacatcaggggcgttgccgttaagcaagttgatgttttcctgtgggatatccacatggtcaaagaaattctgatacatgaaggtgtgatagctttccggatgatcggttggcaaacctacgtattcatccatgttgaaagtcacgacatgcttgaaactaacttcaccagctttatgcattgcaatcaaatgcttgtacgcttccagcggagtgccgccggtaggcagacccagcacaaaaggacgctccgcggtcggtttgaacgcattgatgcggctaacgatatgtcgtgctgcccatttgccgacttctgcgggagttttcagtgggataagtctcatcatgcacctcatggtttagtcaaaaatgtctatactgtacgcggtttgaatcggtgatctaagggtaactcagattttgattcgcgctttggtacaatgctatgttgatttttcggatgataaaataagttttgtgtcgtggctagcagattggtgttttttgactggtttttggtgactgttatcacaaaaaaggaggttttaatttgcgatacgaaataatttttttacactccgcaatgagtaatacgtgccatgcgttttttctaaaaggtagtgaacaaaacaaataaactacttaaagggtccgatatcggacgaatagggggaaaggtgaatattcttagttacttgcaaaaagtggggcgggctttgatggtccctgtggccacactgcccgcagccgcgatactcatgggtgtgggttactggattgacccagtaggctgggggggggataacgcattagcggcgttatttatcaaatccggttctgcgatcatcgataacatgtctgtgctgttcgccattggtgtggcttacggtatgtctaaagacaaagacggtgctgctgcgctgaccggttttgtcggcttcctggttctgactactctgtgttccccggccgctgtgtcgatgattcaaaagattcctgtggatcaggttccggctgcgttcggtaaaatcaacaaccagttcgtgggtatcctggtgggtatcatctcggccgagttgtacaaccgctttagccatgtagagctgccaaaagcgctgtccttcttcagcggccgtcgtctggtgccaatcctgacttccttcctgatgattgccgttgcctttgttctgatgtatctctggccgttgatttacaacgcgttggtgactttcggtgaatacatcaaagatatgggctccgttggcgcaggtatctatgccttcttcaaccgtttactgattccggtcggtttgcatcacgccctgaactccgtgttctggtttgacgttgccggtattaacgatattcctaacttcctgggtggccaacagtctattgacgccggtaaagcggttgtaggtatcaccggtcgttatcaggcgggcttcttcccaatcatgatgttcggtttacctggcgcggcgttggcgatttatcactgcgcacgtccagaaaacaaagccaaagtggcgggtatcatgatggcgggtgcctttgccgccttcttcaccggtatcaccgaacctcttgaattctccttcatgtttgttgctccggtgctgtacttcattcacgccgtgctgaccggtatttccgtattcatcgctgccagcatgcattggatagctggcttcggtttcagcgccggtctggtggatatggtgctgtcttcacgtaacccgttggccactcattggtatatgctgattccgcagggcctggtgttcttcgccatctactatgtggtattccgtttcactatcaacaaattcaacctgctgaccccgggtcgtgaactggcgactgccggtgacgaaaccgacggctacgatgttgacgtggataatgctaatccaaataacgagagcgaaatcaacgcactggctcgccgttatgtgggtgccatcggtggttcagataacctgaccaacattgatgcctgtattactcgtctgcgtttgaacgtgaaagattctgcgttggttaacgatagtctggctaaacgcctgggcgcgtcgggtatcattcgcctgaataaacaaagcgtacaaatcatcgttggtactcgtgcagaactgatcgctggcgcaatgcgtaccgtactggccagtggccagattcctgcggccagcgcttcagctgcggcagaaattaagcctcaggcggtgatcaatacgcctaaagccccatctttggtgctggtggcaccggtaaccggtgacgtggttgcgttggagcaggttccagacgaagcctttgccagcaaagcagtcggtgatggcgtagccattcgcccaacggataaaaccgtggtttcgcctgctagcggcactattgttaagatctttaatactgaccatgctttctgtctagaaaccgacactggcgctgaaatcgttgtccacatgggcatagatacggtgaaactgaacggtcagggctttgctcgtctggtggaagagggggcagtggtagaagcgggtcaaccgattctggaactggatctggcctacctgaacgccaacgcgcgctctatgattagcccggtagttgttagtaatatcgatgattacgccggtattactctgctggctggcgacaccgtggtggcaggtcagaccaaactgtttgaaattcgcggtaaataaggcgttaacgcgctaattatctgttccgaatagcaaacatatcaacgggaagggagcgatctcttcccgtttttttatgccaaaacgccaatcccccctttttactgtaacaaacggttgtttccgggccgggcttgttggattataggcggttatgtgtttgcgctttgcattgaggaataaagcaatgagtgaggcagaagcccgcccaagtaattttatccgtcaaattatcgacgaagatttagccaccggtaagcatacatcggtacatactcgttttccgcctgagccaaatggttatctgcacattggccatgcgaagtctatttgcctgaactttggtattgcacaagattatcagggccagtgtaacctgcgctttgatgacaccaatccggtaaaagaagacgtcgaatttgttgagtcaatcaagcaagacgtggagtggctgggcttcgaatggagcggtaaaatccgctattcatccgattacttcgatcaactgcatcagtatgcgattgagctgattaacaaaggtctggcctatgttgatgagttgagcgcagagcagatgcgtgaatatcgtggcaccctgacaactccgggtaaaaacagcccgtatcgcgatcgcagcgtggaagaaaacctggcgctgtttgaaaaaatgcgtgccggtgaatttgccgaaggcgctgcctgcctgcgtgccaaaatcgatatggcttcgccatttatcgtgatgcgcgatccggtgctgtaccgcattaaatttgcggaacatcatcagtctggcaataagtggtgcatctacccgatgtatgactttacccactgcatttccgatgcgttggaagggattacccattcgctctgtactttggagttccaggataaccgccgtctgtacgattgggtgctggataacatttctatcgattgccatccacgtcagtacgagttctctcgtctgaatcttgagtacgccatcatgtctaagcgcaagctgaacctgttggtgaccgagaagctggtggaaggttgggatgacccacgtatgcctactatctccggcctgcgtcgtcgtggctatactgcagcgtctatccgcgagttctgccgtcgtatcggcgtaaccaagcaggataacaacgtcgaaatgatgtcgctggaatcctgtatccgtgatgatctgaatgaaaacgcaccgcgcgccatggccgtgctggacccaatcaaggtcattattgagaaccgcaaagcgggtgaagaatggctgacaatgccaaatcatccgaataagccggaaatgggaacccgccaagttccgttcgatagcgaaatttatatcgatcgcgctgatttccgcgaagaagccaataaacagtacaaacgtttggtattgggcaaagaagttcgcctgcgtaatgcctatgtgattaaagccgagcgcgttgaaaaagacgccgaaggtaatgtcactacggtttactgtagctatgacgcggaaaccctgaacaaagatccggccgatggccgtaaagtgaaaggcgttattcactgggtttcagttgctcatgcgttgcctgcggaaattcgtttgtacgatcgtttgtttagtgtaccaaaccccgcggcggcagaagacttcctgtcaacggtgaacccagagtctctggttatccgtcagggctttgttgagccaagcctggttgacgctaagccggaaaaaacctaccagttcgaacgcgaagggtatttctgcgctgatagccgttactctagcgccgagcatttggtatttaaccgtaccgttggcctgcgtgatacctgggctgctaaagcaactgcctgattaggctagtgattagtcatattgaaaagcgtagcttcggctgcgcttttttttgtctgttttctgtgttgtgctgaatattcgttactatgactcaaccactcaaccactcaaccactcaaccactcaaccactcaaccactcaaccactcaaccactcaaccactcaaccactcaaccactcaaccactcaaccactcaaccactcaaccactcaaccactcaaccactcaaccactcaaccactcaaccactcaaccactcaaccactcaaccactcaaccacttaaccacttaaccactcaacgacttaaccactcaacgacttagtcattcagccaaccatctgtcgctcgattattatgggccgcgttgcggtttaatttattaaacctgaacatcaggttgctccaattgataatgtcccattctttgcttttagggctgtaaagttaacgctcgagttaatactgaattttgagtggaataacggcatcaagaatattcgcattgcgaattaatggcgttgataaatgttcattagaacagatttttaatagtttgattcgtcgctgaaacctttcaatcatccctcgttgactttttatcgttgtattaattaggtttttaaccagaaattcagattttgtgaagtcagtaatattttttcatagttatgtgcacattgtcatattttggctaaataccttttttttcaattgataattcgcgtcgcgaaaaatagtctgtgtttagcaaataatgctaacgaggattatccctcactatttctttacccagatgggttttatttcagcggaacctgtgagcagtggtgaacacaaggcaacgctatttacttgtgatgtcaaagaggaattttttcatatggttacgcactgtgctaaacgtaaaacgttagcgctcgcagtcgcgggcgcggtgttagggactgggttcatgatagcgccggaggcgcaagctgaaggttttatcgatgattcatcacttactggtggtgtttactattggcagcgccaacgtgatcgtaaggacctaacgcctgacagtgcggactacggcaaatatgtcgccaacctgcatcactcgacttttaacgccaatctggatttctcttctggctacgccgctgacatgttcggtatcgacctggcggccttcggtgccgtagagatgaccaacagcggcccggcggcaccaaacgaaatcggcttcagtgatgcgaaaagccgttgggatgaaaaatggaccggtgacaccagcggtgtgagcctgtataaagccgccgcgaaattcaagtttggcgattactgggcgcagggcggttacattcaaccaaaaggtcaaagcttactggctccgcactggagctttatgccgggcacctaccgtggtgctgaaggtggcgcgaagtttgatttcgacaccgccggtgcgctctccatgtcttacatgtggaccgacgaatacaaagcgccttggtatcgcaatatgtacaacttccgtcaggctgatggcttgaccggcgtgagctacctacactccttcggtgctaaatacgacttcaaaaacaaactggttatggaagcggcgtttggtcaagcaaaagactacatggatcagtattttgctaaagcctcttatgccttcccggttgcaggtaacgatctgcgaacgtcttaccagttctacggggctaaagacaaagttgacggcggcgcaagcaaccctaacgacgtttacgacggtctggcatggttgcaggcgctgaccttcggttataccaccgggccatttgacctgcgtctggaaggtacctgggccaaggctgaaggcaatcagggctacttcctgcaacgtatgactccgggctatgccagctccaatggtcgtttggacgtgtggtgggattcccgctccgactttaacgccaacggcgaaaaagcagtatttgctggcgtaatgtatgacctggttaattggaatatggctggttggtctgtcggtacctcctatgcttacggctgggatgcaaaaccaagctctaatccagtgttcgatcagaatactcgtttaaaagagtctgcatggaacttcgacgtgctgtacaccttgcaggaaggccgagccaaagggacattattcaaactgcattacaccatgtatgacaaccacaccaatatcccgagctacggcggtggttttggcaacatcttccaggatgagaaagacattaaatttatcgtgatcgcgccgttcaccatcttctaactgtcggccccggcggagtcgtcggggcgcataacggagtctgtgtcatgaaaaaactgataggtgtggttgccgttgttctgggattgagcgcctgtgttcagcaagcgccggtacagccggaagattcgaaactgaaacaagcttacagtgcttgtatcaatgccagtgaagggtcgccagaaaggctgattccttgcaaagcggtgttaaacgtattgaagcaggaaaaagcccaccagacctttgctgagaaagaaaacgttcgcgtattggattaccaacgttgtctggatgccgaacagacgggcaacggtcaggcttatgccgctcagtgcggaaagctgtggcaggaaatacgtaacaataattaaggatggatgaggtgagtcatgaataaattcaaactaagtgctttggctgcgttaacagcaacttttggtttgatgggggcggcgcaagccagccccgccgaccaacaggttgtcgaccaactaagccagcttaaggttaatttcaaaataaaagataaccgagccgcagataatggaacggattgtgccgcgttgggagctgactgggcctcttgtaacaaaacactgattactctgaccaacgccggggatgagattcagggtaaagattgggcgctgtatttccataatgtgcgtcaggtgctggcggtgggtaacgatcagttcaaaattacccatttgaccggcgatctgcataaaatcgagccaaccgataagttcagcggttttccggccaataaagcagtggaaatcccgatcacaggtgaatactggcagctattcgaaaccgactttatgccgcgctggtacgccacttctggcgatgtgcagccaaaagttctggctagtactgacaccgaagatatcgatcaattcctgacgcgcttcactggggatcaatggaagcgtaccaaggacgataataacgttctgatgacgcctgaatcccgttttgttaagaacgaaagtctgaaaaccctgccggcagaaagcctgcgtgggcagattattccaacgccgatgagcgtcaaagttcataacgctgatgtcgatctgagcaaaggcgtggcgctggagttgagtgctttaccaaaacctgcggcagacgcagcgcagaaacgctttgaaatgctgggtgtgaatgttaatgcggcgggctacccgataacgactatgattcagccgagtgattttaaaggcgatctggccgttgctggtgcttatgaactgaagattggcgagcagggcgcgcaggtaattggtttcgatcaaaccggcgtgttttacggtttacagtcaatcctgtcgctgattccgtccgatggcagtaagaaaattgctactctggatgccaaagatgcaccgcgctttgaatatcgcgcgctgttccttgatgtcggccgtaactttaaaaccaaggatgcggtactgcgtttgttggaccaaatgtccgcttacaagctaaacaaattccacttccatcttagcgatgatgaaggctggcgcatagaaattccgggcttaccggagctgaccgaagtgggaagcaagcgttgccacgatctcagcgaaaatgcctgtttattgccacagttaggttcaggcccggatagcaataatctgggaagcgggcactttagccgtcaggattacatcgatatcctgaaatatgccaaagcgcgccagattgaagtgattcccgaaatcgatatgccggctcacgcccgtgctgcggtcgtttcgatggaagctcgctataacaatctgatgaagcagggtaaagaagcagaagccaatgaattccgcctgctggacccgacggatgattccaatacgacttcagttcagttctatgagcgtaaaagctacctgaatccctgcctggattcttccaaacgctttgtggataaagtgattggcgaaatggctcagatgcataaagaagcgggtatgccgctgcaaacctggcactttggcggagatgaggcgaaaaatatccgtttgggcgcgggtttccaggataaaaacggcaagattgagccgggcaagggcattatcgatcagagcatcgaagataaaccttgggcgaagtctcaggtttgtcaggacatggttaagcaaggaaaaattgaggacgtggaacacctcgctagccactttgcgatagaagtgagcaagttggttaatgcgcacggtattgagaaaatgcaggcctggcaggatggtttgaaaaacgccaaagatgccaaagctttcgctaccaaacgcgtaggtgtgaacttctgggataccctgtattggggcggagccgattcggtgaacgattgggcgaataaaggctatgaagtcatcgcttctaacccagactatgtttacttcgatatgccttatgaagtgaacccgcgtgagcggggctattactgggcaactcgttttaccgatgaagctaaggtattcagttttgcgccaaataacatgccgcagaacgctgaaacttccgttgaccgcgatggtaaccatttcagcgccaagagtgataagccttggccgggtgttcacggtatttcaggtcagtcgtggaatgaaactgtacgtacggacgatcaaatggaatacatgatgttcccacgagcgctgccgttggcagaacgtgcttggcatcgcgcaccttgggagcaggattataaagcgggccgcgagtacaaaggtggagaaacccatcatgtggatactcaggcgttaagtgccgattggcagcgttttgccaatattatgggtcagcgcgagttggcaaaactggataaggccggtatctcgtatcgcctgccagtgccgggagcgcgtgttcagggcggcttattggaggctaacgttagcctgccggggctgaccatagaatactccgttgacggtggtcagcaatggcagaaatacgatatcaaaaaccagccgaaggtcagtggcgaagtgatgattcgttctgccagtccggacggtaagcgcaacagtcgtgctgaagtcgttagcgcaactttgtaattatccgtctagttgtagtatcggccctgagcaattggggccaaattaacctgttgttaaactgagtgttattaagctgtgtctagttatctcctgtttaagttgagttgatggtaatttccccggtgcccccggggtttttttttgcctgttatttagtgtaattatttgcgaacgtttttagtcgctgagccttattttagataaagatgacttaggcccaaaataattgaaatttaatctgtttatttgaacgctaaataacaataggcggagaaggaaaatagatttatgaggagtaaaaaaaagaccacgcattttccaagtgtattttacgacttagagaagggtggtctgatactcggatctgatgaatcagatcttattttttgtcgtgcaaagtctcatcttcacggcaatcgccgccttcacagtgaccgtataaatacaggctgtgattcgtcagcttgataccgtgctgagttgcgatttcacgttggcggacttcaatggattcatcgctgaactcgatcactttgccacaatccaggcaaatcaggtgatcgtgatgatgctgttgggtcagttcaaagacagacttgccaccttcgaaattatggcgggtgacaataccggcgtcgtcaaactggttaagtacgcggtaaaccgtggccagaccaatctcttcacccatatcgatcagctttttataaagatcttccgcactgacgtgatggcaatctggcttttgcagcacttccaaaatcttcaggcgcggaagcgttaccttaaggccagcgttctttaatgctctgttgttgtcagtcatgcggattcagtcctgttactttgttattcaaattgaggctgttcagcctatgacatcggtaggcacaaaaatataattgcgtctcattatagaaccggtagctcaaaatgaaaaccgtaggttattaacaaagatataattgcacactttgcaagattaatcatgcagcgtattgatgaacggggagaacagatagccctagtgtacagtgatggcgacggaacttacaaatttaaaactgtttagtttcgttaacgccttattatcatctatttttgtggggtttttgccgcacatttacgcaccagaatggagaaccatgccctgatcgcaaaccaggcaattcagggcatgttaggcagattaacccacgatatctgacagactcagttcttcgctgatttgttttacccaagcttcaacgcgttcgttggtcagctctggttgacggtcttcatcgatagccaagccgataaagtgatcgtcatccgccagaccttttgacgcttcgaaatggtagcctgcggttggccaatgaccgacaatggctgcgccacgcggttcgatgatgtcacgtactgtgcccatggcatcacagaaatattccgcatagtcttcctgatcgccacagccaaacagggcaaccagcttgccattgaaatcgatctcttccagcgttgggaagaaatcatcccaatcacactgtgcttcgccgtagtaccaggttgggatcccgatcagcaaaatatcgaattgctctaaatcttctttgctgcttttggcaatgtcgtgaacctctgcaacgtctttgcccagtagcttttggatcatcttggcaatgttttcggtattgcctgtgtcgctgccaaagaaaatgcctacagttgccatatgaaatttatacctttgaattcaattagttacgttagttgtggagcctgctgctccacaatataacacatttttcatcgtgcttgtggaaagcgcctttttgctgaggctgactcatctgattttattaacaggctgattgctaagccattgtttcaaaaaagagtcatcagggactacgcaggtgactaaatccttaatagaaataaggaattaagtcctcagactgactatttccaataggccgtcatcatgccagaaaacatctctctgcttatatcaagtttatgcgatataaaattttcatctaccgctcaaccttggcagacgattgccgataaccgaattgaaacccgcgggtttcgattgcggtgccaaggagggccttgtcaaatcgatttttgatgaggaaggagaagtcgttggctgtatggaacgtcctaaatcgcttttcggtcatcaaactccaccagaattttgtggcaacaatccgacaataaatagaaaaggaacgaacatgcagtttttgaaaaatatcaccatcagggcagcgttactttgggttctcggggcatttagcttgctctggggcggagtttcagcttacacattattatcactcaatgagttaactcaagcctcaaacgcgaatagcgttttggtcgataacatcagcttggtcaatcagggaaccgatcagtatttccgtatggtgacccgattgagtcgttcagtggattatcgtctggcagggaatagcgcagatgccgatcgtgagctgaaatcctccaatctggccttggatagcctgaaaaagaacttggcacagtttaaatctatcgatcatgcgcagctcagcccggtattggttgaggatgttatttctaactggaatgccctgattgcccaaggggtggaaccactgtatcaagcggctatggccggtgataatactgcttaccagctgttgtccaagcaaacggtaccagccttaagccgtcagtatggcgcgtcatccgaggcattcagtaaaactgcatcggcagaaatcggcgtggtgaaggagcaatttgctcatcttaccaaggtaagcagcgttacgctggtttcggcgctggtgattggtctgttgatattactggcgacggatcgctttttggtggcaaatctggtgcgtccgctcaatatgatgcgcgaccatttcaaagtgattgcctccggtcagctgggacaacccattgtcgattttgggcgcaactgtgtcggccagttattcccactattgcgggatgtgcagaccagtttggccaacaccgttagcgcaatccgcgacagcaccgacagtatttatcatggtgcatctgagatttctgcgggtaataccgatttgtcttcccgtaccgaacagcaggccgcggcattagaagaaaccgcagccagcatggagcagctcacggcgacggtgaaacacaacgcagataatgctcatcacgccagccaattggcggcgacggcatcatctacggcgaaaaagggtggctctctggtttctgacgtagtgcatactatggccgatatctctgccagttcgaagaaaatcgccgaaattaccacagtgattaacagtattgcttttcaaaccaatattctggctctgaatgcggcggttgaagcggccagagccggtgagcaagggcgcggctttgccgtggttgccagcgaagtgcgcaatttggcacagcgcagtgctcaggcggcgaaggaaatcgaagggttaatcaccgaatcggtcaatcgtgtcaccagcggctctgcgcaggttgaaagcgctggcaataccatggacgaaattgtgcgctctattactaacgttacggatctgatgggcgaaatcgcgtcggcttctgatgagcaaagtaaaggaatcagtcaggtcggtcaggccgtggccgaaatggatagcgtgacacaacaaaacgccgcgttggtgcaggaagcatcacgggctgccgcttcactggaagatcaggctgctaagttgaatcaagcggtggcggtatttaaattgaaggatgacaaggtaacaccggcggctaaaaccagggtaaacccggtgaaagcgccgacgacccagcgcgtggacaataacgcgaattgggaaaccttttaactaaccagtgccataacattgaaagagtaaatatggagtggcgtaatgaaacacgccactccagcgtagtcaccgacggcattatagccctgcctgatccttagccaactgggcaagcagcatttgctcaatcagttcgctacggctgatgttacgttgctctgcaaggctattgagagcatcgaccgcatctgcattaatcttcagttccacgcgccgtaagccacgtactttatcgcgccgtagttgatttcgcttattaattctaagctgttcatcacgggataatgggtttgttttcgggcgccccggacggcgttcatctgcgaacagatccagcgtcgtgcgatccgtttgttcttttgccataggtagcggtactacaagggattcacatcagaaagcgttttagcttttccagatgatttggttaacacgtttcagaccaaaataaccgggctgaatttgcatttgtcccccggcacggcctgagtattacggctgaacgcggcggcaaaattatagcgcgccataataccctagccaatgaagtgccgacaatgactaactgcaattagatcaggctaattcgttattttttgcacaatttttccacaggaaatacatttcttttccccagggtacaaattttaaacaacagtattagcctcgcactttattccgcgtcgagaaaacggtggatagcacgtaataccgcctggggtttttccgcatggacccaatgcccgcagccggaaataacatgagcgcgagcctgcgggaactgacgggcaatttcatctcggtaactgtcctgaatataaggcgacaattcgccacgaataaacagaataggatgcgaccaaggcggaacaggctgccagccgacaatattttcatattgattccacagcgcctgtacgtcaaaacgccattctccagcctgaaatgatttcagcaggaattgaatcacaccttcttcttttatgatttcccgcatgatttttgccgcatcctgacgttgggtcacgccggcttcggtcacggcgttgagcgcagcgaaaatctgatcgtggcgtcgggtttgataatcgatcggtgcaatatcaatggcgaccagtttatcaatgcgatccggcgcaagagccgttagcgccattgccacttttccgcccatggaatggccgataataatggctttttctatggttaaatgatcgagtaattccagaacgtcctgcgccatcgccgggtagttcatttgcggggaacgaggagataaaccgtgatcccgcagatcgatttgcactacggtatgggtctgttgcaggtcgcgagccagcacgccgaggttatcaaggttgccaaacaagccgtggatcagcaggatagggagattattagtcggagaatgtgcgctttgtaagcgaaagttcaatttcatggcgaagttcatacagagagatattgtggttagggtatcatgactggatgatggtgtgctgctccggaatgacgcggattatcagaacaaagttgaataacgatctattcaggcttttcatcgccagatccgttatggcgctattcgccagccagctttgactttataatccttggatatgaataaagaaagtagaaaaacagtactggataaagatgaaaactattgaagtcgacgaagagctttatcgttatattgccagccatacgcagcatatcggcgagagtgcgtccgatattttacggcgcatgttgaaatttaccgctgggcaaccggtacgtactgttcctgcgggcgaagtcgccaagacgccggtggcggtagtgcctggtccgcgagatcgcgtgcgcgcgctgcgagaactgctgctttccgatgaatatgccgagcaaaacaaagcggttaaccgttttatgctggtgttatctacactttataccttggatgcagcggaatttgcggcggcaacggagtcactgcacggccggacccgcacctattttgccggtgatcaacaaacgctgctgcaaaatggcactcataccaagccaaaacacgttcctggaacgccatattgggtgattaccaataccaataccgagcgtaagcgcagcatggttcagcatattatgctggcgatgcagttcccgccggatttgaccgaaaaagtgtgtgggactatctaattcacatctattgcctctttccgttggctacaggctgcgcggaaggagttttttagctaattaggagtagtgacagtggcttatcatcctcgtgccgggcaacctacccgccaaagcgatttgattaacgttgctcaactgacgtcgcaatattatgtgctgcgcccagatgctgaaaatccggctcacggggtaaaatttggtacctctgggcaccgtggcagttctttgcgtcacagtttcaacgaagaccatattctggctattgctcaggcgattgccgaagtgcgccatcaacacggcattaccggcccgtgctacgtaggtaaagatacccacgcactgtcagaaccggcaattatttcggtgttggaagtgctaaccgccaacggcgttgacgtggtggttcagacagacaatggctttacgccgactccggctatttcccacgccattttgacctataaccgtcagaataaaacgctggcagacggcattgtcattacgccttctcataatccgccggaagacggtggtattaaatacaatccgcctaacggtgggcctgcggataccaatctgacttcggtgattgaaaagcgtgccaaccagttactggccgaaaagctggctggagtgaagcgtcaatcgttggataaagcctggcgtggcaatcgtctgcgtcagcaggatttgattcagccttacgtcgaaggtttggttgacgtggttgatatgccagctattcagcgtgccggtttgaaactgggcgtcgatccgctaggcggttcaggtattgcttactggcagcgaattggcgagcactacaagctggatttaacgctggttaatgattctatcgatcagactttccgctttatgcatttggatcacgatggcgtaattcgcatggattgttcgtcagagtgcgctatggcaggcttgctggcgctgcgcgacaagttcgatttagcctttgccaacgacccggattacgaccgtcacgggattgtcactccgtcaggtttgatgaatccgaaccattatctggcggtggccattaactacctgttccagcatcgtccgcgctggggggcagaggtcgcggtaggtaaaacgctggtttccagcgcgatgattgaccgcgtagtggctgatttaggccgcaaactggtggaagtgccggtgggctttaaatggttcgtcgaaggtttgcataacggtagctttggtttcggtggcgaagaaagcgccggtgcctctttcctgcgtttcgatggcacgccgtggtctacggacaaagacggtattatcatgtgtctgcttgctgctgaaattaccgccgtgaccggtgagaacccgcagcaccattataacgatctggctaaacgtttcggcgcgccaagttacaatcgcattcaggcaccggcgactcaggcagaaaaaaatgctttatccaaactgtcgccggaaatggtcacggccagcacgctggcgggtgatccaatcaccgcacgtctgaccgcagcgccgggcaatggggcgtctatcggtggcctgaaagtgatgaccgacaacggctggtttgccgctcgtccatctggcaccgaagaagcttacaaaatctattgtgaaagtttcctgggcgcagagcatcgcgaaaaaattgagaaagaagccgttgatattgtgagtgaagtattggctggcgcgaagaaatagcttttaagtttctcgcaaactcatgaaataacatggcagctccgcaagggactgcctttttttcgcgattagcccaaggcaaccagcagcgcgcctatgctaatcagggcaacgccaataccggcgataaacgaaatcttctcgccaaataaaatcacagccaaaatcaccgcaaacactacgctgagtttatcaatgggcgcaacctgcgaaacggtgccgtttttgatagccataaagtaaaacaaccaggacagcgccccggccacgccgcttagtacgataaacagcaaggcttttttatcggtgagtacggtacccaccagatgatatttcccctgaaccaccactacgccgactaaaaacagcgccatcaccacggccctcacggcggtggcggtattggcatccagatgttgaagaccgattttgccaaatatggcgaccagcgaagcggtaaaggcagagagtaaagcgtagattaaccaggtactcatagcgaataagacctatttgcaacgaaaactccgatgctacgcctgcaaactttccttgcctacccttaaaggtaaatcttagcgcggtaatgtatcagcaataaaacgatagccgacgccagtttcggtaatcagatgtttagggcgtgcgggatcggcctccagcttttgccgtaggtgacccatataaattcgcagatagtgattgtgctcgacgtagtttggtccccacacctgattcagcagttggcgctgggtgatgacttttccagggttggccagcagggcggttagcaggcgaaattccaacggcgttaggtggaggtcttcatcgccgcgtttgacctgacggttgatcagatcaacgctcacatcggcaaaactgacgatggggctttcctgcgctccagatccgtgacgacgtagtgccactcggactctggccagtaattcgctgataccaaaaggtttgctcagataatcgtctgcgccggcatccagcgcggccactttgtcttcttcgctattccgggcggagagcacaatcactgggatagcgctccattggcgcaaatcctgaatataatccagaccgtcgccgtccggtaacccgagatcgaggatgattaaatccggtttgcgggtgccagcctcgatcaaacctcgctgtagggtgtcgctgtcaaatacccggcagccttcgttctccaacgcggtacggacaaagcggcggatctctttttcatcttcaacaattaaaacggtagctggagagataatcacatgtcctcaggattaacgttatccatatctggtggaacctccaatggcaggacaaaatggaaaacagcaccgccgttttggcctttctctgcccagattctcccaccgtgaacatcaataatggcacggcaaatggctaaccccaagcccacgccgggaatggccgactctttattgccacgggagaatttatcaaaaataagctgctcttgcccaccggtaataccaggcccgttatcccagacttccacattcagccattcttcctgaactttggcgcgaatgcctagggttgcgctcggtccggcatatttatgagcattttccaataggttgataaagacccgctccagcagactgccatcacaattaatcagtaccatttcactgggtaaatccagctcgataagatgagaactgagcgttgtttccagcatgtgcagcgcgctgccgacgatttcttccaacgattgccattctttccgcaggttaaaaccgccggattgaatccgcgccatatccagcaaattattaaccaatcgagtggtgctaagcacctgttgacgaatctggctggcctgcggcgcgtggcgggaaccttcagccgctaagtccaaggtcaggatttcggcctgcccgaataatacggttaacggagtgcgtaaatcgtgggaaagcgccgccagcagggaatttcgcagttgttcgcgctctgcgtccagtttggcgacttcggcggtacgggccagatgcagacgctccagcgcgttggctatcaggctggtaaaggtttgtagcaaacgctgctgctctggcaccatcaattgccgtaggttggccggttcaatcgccagcacgccgaaggtttgttttgaggtggtcagtggcaacagttgataaggtacgccgggcagggtatcggtacctgcgcctgcgggagcaccgtgatcgaaactccagcgggcaatggcttcatccaccgaaaaaatattgccgtcttcggtgccaatttggtgtaatcgcccgtcttcctgcggcagcaacaggccagttttggcctgaaaactgctggaaagaaagtggcggctggttttggcaatgtcaacgcagcttaatgcgcggctcaggccgcgggacatctcatacaaatgtctggctcgttgctcgcgataacgggcgatgcgcgcctgatagcgtacgccggcggttagattccccacgacgatgccgacaatcaacatcacgccaaaagtgaccagatattgcacatcagtcaccgccagcgaccagtggggttggacaaagaacagatcgaaactggcgacgtttagtacggcagccagcacagacggccagcgcccgtaaaacagcgcaatgatcaccacgccgagcagataaaccatcaccagattcgcctgatcaaatccggggatcagccactgagataaaatagtgatcagtgcacacagcccgatcgcggccgcgcagccttgtagctgcatgcgccatttttcgctaaaactgcgtgtatcattttctttggccgccgcaggttgatggtcattttccaatgcgacaatcaccaaatccagatccggccccagcttgcccagtcgatcgccaaaactgccgcgcagtttccagcgttgctcgctgcggcgaccaataatgattttccccagattgtgatcgcgagcgtaacgtagaatcgcccgttcttcacaaggatcggaaagggtagcggtttccgcgcctaattcttgcgccagcttcaaggcgcgtaggatggctcggcgtttcgcttccggcaatgcgtggagacgtggcgtctctacgtagaccgcgtgccagatacagccgagacgagccgccaaacgcgctgcggtgcgcaccagcttctcattaccgacattgtggccgatacacagcaaaatcgcatcgcgggtgtgccaaacgcgctcgcggccttgggtatcccgaaaggcgcgcatttggtcgtccacccgatcggcggtacgacgtagcgccagctcgcgcagagcgatcagattacctttgcggaaaaaatgttcgatggcacgttcggcctgaccggaaatatacactttgccttcgttcaggcggcggcgtaggtcatccggtggcagatccaccagtacgacttccgtggcttcatcgaacatatgatcgggaatcgtttcccgcacgcgaataccggtcacgccgcctacgacgtcattcaggctttccagatgctgtacattgacggtagtcagcacatcaatgcctgaatccagcaattcttccacatcctgccagcgtttgggatggcgcgaaccgttggcgttactgtgcgccagttcatccatcagaatcagcgccggatgacgcgccagcgccgcatccagatcaaattcgcgtacctggcgattgcgatgagcaatacgcttgagcggtagctgatctaacccttccagcagcgcggcggtttcactgcgaccatgggtttctaccacgccaaccagcacatccagcccttgagcacgcaggcgctgcgcctcttgcagcatggcgtaggttttccctactccggcgcaggcaccaaagaagaccttgagcttgccgcgtggtttttcgttcgccactgccagcagactatcgggatctggacggattggttcggcatccacggtgatttttccttattgttttagcggtttaacgttatccagtgccatattcagtatcagcacgttcaccacgctttctccgaggaagttcggaaccgatttctgctcattttttgcgatgagatcctgcacttcggataatgttaactggcgggctttagccacgcgattagcctgataataggcggcttccagcgatatttgcggatcgagaccgctaccggaggcggtaaccaaatccaccggaaccgggccggtttgatctgggttagccaaacgcagtgctttaatccgttcgttaatctcggcatccagtgctgggttgctaatagctaaattactgccgccggatgacagagcattataaggtatatccgatgtggccgatgggcgaccactaaaatatcccggttgagtaaactgctgaccaatcagtgtcgaaccgaccgcttcgccgcccagcgttgccagagaaccatgggctttatcgctaaaaataacctgagccaaaccggtagtcagtaatggataggcgataccggtgatcagggttaataaaatcactaaaatcagtgacggacgcagataagacatcataaaaacctcgttattcacgcaggccggacgcagtgtccggcagccattaagcgctcgttcaacccatattcagcgcggttaacaccaaatcgatcagtttgatcccgacaaaaggcactaataaaccgcctaagccgtagatccataaatttcgacgcaacaaagccgcagcgctcatcgctttataactgacgccttttaacgccagtggaatcagaaacacaatcactaaggcgttgaaaattaccgccgatagaatggcggaagacggggagtgcaattgcatcacgtttaacgcattcaactgcgggtaagtggcagcgaaagcggccggaataatggcaaaatatttcgctacatcgttggcaatactaaaggtcgtcagggaaccgcgagtcatcagcatttgtttaccgatgtgtacaacctcaatcagtttggtcggattggagtctaaatccaccatattgcccgcttctttcgctgcctgcgtccctgagttcatcgccaccgcgacatcggcctgtgccagcgccggcgcgtcattggtaccgtcgccggtcatcgcgaccagacgaccttctccctgatattgacgaatcagcgccagcttggcttccggcgtggcttcggccagaaaatcatctaccccggcttcggcggcaatggctgcggcggtcagacggttatcgccggtaatcatcacggttttgatgcccattttgcgtaattcggcaaaacgctctttaatcccgcctttgacgatatctttcaacgcgacgacacccaaaacccgagcgccctctgcgacgaccaacggcgtgccgccggttttcgctacgctttcaaccaaatcgtccacggcgcgtgggaaatggccattattcgactccacgtggcgacgaatggcatctaccgcgcctttgcgaatcattctatcctgcacgtttacgccgctcatgcgggtttgggcagagaaggggacaaaggttgcattcaaggcatgaatatcacgctcccgcaaattaaagcgctgtttcgccagcacgacgatactgcggccttctggcgtttcatcggctaaagaagatagctgggcggcgtctgccaattgctgttcggtaacgccgggtgcaggcaggaattccgaagcctgacggttgcccaatgtgatggtgccggttttatccagcaacagcacatcgacatcgccagcggcttccaccgcgcgcccgctggtggctatcacgttggcacccagcatccggctcatgccggctaccccaatggctgataacaggccgccgatggtggttggaatcaaacacaccagcaacgctaccagaacggtaatggttaccggactgccagcctgattagcttccacactaaataatgagaagggaaacagcgtagccgttgccagcaaaaacacgatggttaaggccaccagtaaaatggtcaaagccacttcatttggtgttttacgccgttttgctccttccaccatcgctatcatgcgatcgaggaaagtctcgccgggattgacgctgcactcgactaccaaccaatcggacagcacgcgagtcccgccggtaacggaggagaaatcgccgccggattcgcgaataaccggagcagattcgccggtaatggcgctttcatccaccgatgcgccaccttccagcacttcgccatcgcaggggacggtatctccggcttgtactagcaccaaatcgccttttcgcaggctatcggcggatactttctcctgcggcgcatccgcgtgaggagcgctaagttttttagcccaactggttttttttacccctctcaggctttcggcctgagccttactgcggccttctgccagcgcttcggcaaagttggcaaacagcacggtaaaccaaagccaaagggctacgttaccggtaaacatggcgttgccgtcggcttgcccgctgagaatcgccagccagatagcggttgtcaaccaactgcctaggtacaccacgaacattaccgggttacgccattgggtacgcgggtccaattttttcactgcatcaatcagtgcggtgcgaaccagtgcgggctcaaagagtgcgcgttgtttgcgagtcatatgtgttctctctctacaaccgaatcgttgttaacattatttattaataatcagcgtgttaaccaaactttcagatgttcagcgaccggccctaatgccagtgcaggaataaaggtcagagcgccaaccaacatcacggtaccgaccaacagaccaacaaacagcggacctgaagttggtaacgtgccgttccccgccggttgacgttttttcgccgccagcgatcccgcgatagccagaaccggtaaaatgacgccaaagcggccgatgaacatcgccagcgccaataacaggttatagaacggggtattgacgctcaggccagcgaaggcgctgccattgttgttagccgccgatgacagggcgtacagcacttcactgaaaccatgagcgcccggattaagaattcctgctcgcccggcgtcggtgttcagtgccagcgcggtgcctagcagtaccacggtcggcgtgaccagaatggccagtgcggtcattttcatatcgaacacatcgatttttttacccagatattccggcgtgcggccaatcatcagcccggcgataaacaccgtcagcagcacaaacagcagcatcccgtataagccagagccaacgccgccgaacaccacttcgccaatttgcatcagccacatcggcaccatgccgcccagcgcggtaaaggagtcatgcatagcgttaaccgccccacacgacgcggctgtggttactacggcgtacatactggacgacagaatcccgaagcggctttctttaccttccatattgatattgctgtcagcgccgagcagggtaaggtgcgggttgcctgtcagttcggcgtacatcactacagcgacagcagtgatgaaaatcagtgacatagcccaaatcagcgcatgaccctggcggttatctcccactacctgaccaaaagcaaaacacagggcacagggaataaggaaaattgccagcatttgcacaaaattgctgaaagcggttgggttttcaaacggatgagcggagttggcgccaaagaaaccgccgccgttggtgccgagcattttaatcgcttcctgtgaagccactggccccatcggtaggatctgttttgctccctctagcgttgtaacgtgttggtaagcatcaaaattctgtaaaacgccttggctgacaaaaatcagcgcgataatcagagaaaggggcaatagcacgtatagagtaatgcgcagaatatcaacccaggcattacctagtgtgttggaagaatggcgggcgaaggcgcgaatcaacgcaaaagccacggtgatacccgttgcggcagacaggaagttttgcaccgtcaaaccggccatttggctgagataactgagcgtattctctccgctgtaggcctgccagttggtattcgtgacaaaactgacggtggtatttaacgctaactgccaggacatccccggtaaatgttgaggatttagaggcagagcgccctgagacattaataatgtgaataaaaatattccaccaatcagattaaagaataaaatagccagcgcgtattgccaggcattcatttcttcattttttacgccgctacagcgccagatagcggcttccatacgctgtaatcgcgggaatggttcgccttcgattagccgcgccaaaaaaccacccagcgggcgtgaaagaaccagtagcaccaataagaaactggcgataagcaggaaagctgacgcagccatttaaaagtcctccgcattaaataaggcgtataccaaatagcccagaagcaacaggaccagcaacgcaccaacaacgatgctgaaactcacgggacacctccacaggtgatgttttttgataacagcaggttacggagtcataaatatagttactgataaaaaatccgcattgtgtgtaaaaaaaacgtaaaaatggtcaaaaaaggttcataaagtgacgttaatttaggcggtgagtttgtggtagagatactttgagttcgaagaaaacaggaatgctaatttcatgctcataacgttatcaatctcgcaactaaaatagccacaagataactaaaggttagttttaaattaaccttaatgtaacaaaattacggaagatgacgataatttgtgtttttcgtgccttttagtggtcggatgagtggtaaactttcattcaatgcggtaaaattttgttcagtttccaaattcacttgtttatttctagcgccaagctgtaaaactgacccagagttgatagtggtctgcctaacagaacggcgcttttaaggaggatcgctatgtctatgtacaatgtatatccattgcatcaggttctcctgcgccgctgcgcagtaatcctgatgggtgttttggctttgccagtgatgttattccgccgtgaccgtgctcgtttttacagctatttgcaccgcgtttgggcgaaaaccagcgataaaccagtatggttagcgcagtctgaattagccgctcgggatttctactgagttaattagaatcccggtgtgaaatcgaatgccagtcagtgcacgctgactggcatttgtttttttggcttcccaataatacggttcacgagtgcccggcggcgctggctttactcacacactctcccctcatcaagccgatatttacctcgccttagggttatttcacgcaataacagttatgcttaaaattcataagattaaaaattctgatgccaatgtgtatcatcgggccagatagcgtgatttaaccaaacgtttcttgaatttattgaatgtcgggagtgaactatgagcgaaaaaatccccgtaggtatcagcgcctgcctgctcggcagcaaggtacgttttgacggtgggcataaacggctggacttcgctacagaagaactggctccctacgtcgaatttgaacccatttgcccagaaatggccattggtttgccttctccgcgtcccgctctacgcttggttcgcaagcaggatgacgtcctgatccgtaccagcaatgacgccaatcaggatgttaccgccgccatgcgtcgttttgccgaggaaaaggtatctcatctcagccatttgtgcggctatattttgtgcgcaaaatctcccagctgcggaatggagcgggtgagggtatacagcgagaaaggcgatttttccaagaaggagggtaccggaattttcgctcaggaattgctaaaacagttgccctggctaccggttgaggaagatggtcgcctgcacgatccgcaactgcgagagaattttgtcgagcgtatctacgcgctggctgagtttaattctctatggaagaaagggttaacgcgcggcagcctaatggcatttcatagtcgttataaactttcactgctcgcgcattctcagcctgaatatcgccagatcggtccttttgtcgccgcaatggatcaatgggaatcactggaagattttgctattgaatatcgtaaccgtttgatgcatttgctggcacataaagcgacccgccgtaatcacactaatgtcttaatgcatgtacaaggttacttccgtcgacatttaaatgctgctcaacggcaagagttggcccagttaatcgaccgctaccgacagggtatgcaacccttattagcgccaataactctgttaaaacattatatggctgagtacccggatgcctatctggcgcaacagcggtattttgaaccgtatccggaggcgttgaggttgcgctacggacattaagcggttggtgatcggctgctgtgtctgtctatttgatttttagataattttataaaaaggaatgccatgactacccatttggtctggtttcgccacgatttgcgcgttaccgataatttggccctgcacgcggcctgtgaagacccgcaggcgcaggtgcaggccgtatttatcgctacgccggggcagtgggcatctcacgatatggcgccgcggcaggccgcatttattcatcaaaacctacaattacttcgacagcaactcgcgctgcgtggtatcccattgcattaccatcaatgccatgatttcgacgcttcagtagactggttagccaatctttgtattgaacaacgcattgataaactgctttataatcatcaatatgaactgaacgaacgactgcgggatacgcagctggaagaaaagcttcgtgggcaagtcatctgtcagggtttccatgacagcctgttattgccgccgggaagcgttctgaccggcaacggcgaaatgtataaggtttacaccccatttcgccgtgcttttatccagcgcttgttgatgactgactgcaactgcgtgccagccccacaaccgcggcagtcgccaatggatgactcatctgcgctcgcaccttttaattatcctgcagcagaagtggacgctgagctctttcccgcgggagaagaggccgctttacgccgccttcgccaattttgtcgcgaaactgtgcaggattatcagaaacagcgagatttgccggcagttgacggaaccagccaattatcgccttatctggctcttggcgtgctgtctccgcgccaatgtttcaatcgactgcgagcagaatgccccaacgtgctggacatgccggacggtggcgcattcaattggcttaatgaattgatctggcgagaattttatcgccatctattggtggcttatccgcgattatgccgaaatcgtccgtttattgactggacggatgaggtacgatggaaccctgctgacgataagttgcaagcgtggcaacaaggcctgaccggctatccgattgtggatgcggcgatgcgacagctaaatgctaccgggtggatgcataatcgcttgcgtatgattaccgccagctttttggtcaaagacctgctgctggattggcgtttaggcgagcggtattttatgtctcagttgttggatggcgatctggctgccaataacgggggctggcaatgggccgcgtcaacggggacagattctgccccgtattttcgtattttcaaccccacgactcaaggggaacggtttgataaacaaggcacttttatccgccgttggctaccggagttagcggcggtgccggaaagtgatattcaccagccttggcgttgggcgcagtggcaacagccgcttgattacccgcagccgatcgtcgatcacaaacaagccagattggacacgttggccgcatttgaggccgccagacgggaacattcccgcacaacataacaacaaggagccagtatgtttaaaaaagggttagtcctgatcttcagcctctattcttcattgagctggggtggatttgaggtggttgcccttggcgtggatggtggcgtcagcgatggcaatttaacctcgtatttaattcgcagcgatactaaccctctgtatcttggtctggacgcaggatctgtgcttcccggtatagccaaaggcttggacaaagggaactttgccgatgtaaccgagcaaaacgcggcgcctttcacccgtcagggctatattttccgtcaacgcattaacagctactttattagtcacgctcatctggatcacgttgcagggctgattattggctctcccgaagacagtaagaaaaccatctatggcaccgccgctacggtggaaaccttgagaaaccactattttaactggcgcgtgtggccgaactttaccgattctggcagtggcacgcgcttgggcacttatcgcctgcaggctccgcgtcccgctcaacgtttcactataggtttaacccgattgatcggtgaaatctatcctctgagccatgaccagtctccttcttcgatgttattgatcggtcagggcgatgagttcttcgcctattttggtgataccgggcctgacgcggtggaaaaatcaaaaaatctggatcagatttggcgcattttgggtgaaaaggtcaaacagaagcagctaaaaggcatgattatcgaggtgtcttacccaaacagcgtggctgacggcaaactttatggtcatatgacacccaaatggttgctggcagagctgaaaaatctggcgaaatacagcggtgaaggcgagcaaccgctgaaagatttaccggtggtgattagccatatcaagccgtcgttacagcaggggccagatccccggaaagtcattgtggatgaactgcagcaggctaacgatctgggcgttaaatttattctgatggagcagggcgacagtcagcaattctgagtgtcgcgggtttgctttcgctaaaatcggcgggtatgttagccccaaaatcgctaaaacgagatgaagatcatgcgtaacaccgaactggaaaccctgataaataccgaattgaataccgctgcttttcaggattatgcgccgaatggcctacaggtcgaaggtcgccctgaggtgcaacgaattgttaccggcgtgacggccagtcaggcgttgctggatgcggcagtggagcatcgggccgacgcgattctggttcaccacggttatttttggaagaatgaaccggtggtagttcgcggtatgaaacgtaatcgcctgaaaaccttacttactgaagatatcaatctctatggataccatctgccgctggatgcgcatccaacgttgggcaataacgcgcagctagccaggctacttgatattcatgttatcggtgaaatcgagtcgttgttgccttatggcgagtttgaaaaaccgatcaataaccagatactgaaagagcgtctggaaaaacagctaggccgcccggttctgcactgtggcgatcacgcgcctacggatattcgtcgcattgcctggtgcacgggcggtgggcaaggttatattcagcaggcggctgatttcggggttgatgcctttgttaccggtgaggtttccgagcagacgattcatattgctcgtgagatgggggtgaatttttatgcggcgggtcaccacgcgaccgaacgcggcggcattaaggcgctgggggagtggctggcgaaccaacacgggtttgacgtgactttcattgatattcctaaccctgcttaatgctctctcaatcacgccgctcaatcaattggtggcgtgaattctctgctctaatcctgaccagaaaagcactattcctcgtaaaaactgagggttattagtttactcatcctaataaaaccctatctgacgaatattaagcgataaaggttatatttatcataacttttaggtattcaatgctgatttttaataagaaataaattagttaattgccaacatagtggtttaaaacacgttaaatattgctttcatagcgattaataatggtgttatccgcttatgtggcagttaatcgcctatctcccgttgttaagcccctattgacagttgcaatgcgctaaagcataactatgtgcttatggctaataattattaagttatagaaacagtcaaagtcttataaagagcagggagataaggattgcaacgagcacgatgttacctattgggagaaagcgcggtggttctggaattggagccgccggtgactctggcaagccaacaacgtatttggggtctggcggatcgcctgattcatcatcctgatgttcgcgaagccattccgggcatgaataacctgacgctgttgctggagaacccgcagcaaacggcgttggatgccattgagcgtttacagcgctggtgggaagaaagtgagtccttggtactcgaatcccgaaacattgatattccggtgatctacggcggagagttcgggccggatctggaagacgtggctcgtcacaccggtttgtcaccgcgtcaggtggtggaatgtcattcttctgcgagttatatcgtctatttcctcggttttcagccgggtttctcctatttaggcggtctgccggaacaactggcaacgccgcgtcgcggggagcctcgtctgtctgttgcaccgggttccgttgggatcggcggcagccaaacgggtatttatccgttagctacccccggtggttggcaattgatagggcgtacttctctggcattgtttaacccgttggaaatgccgcctaccttgcttcgccccggtgataatgtgcgctttgtaccactcaaggagggcgtatgttaaaaattattcgcgccggtatttacaccactattcaggatgaaggccgtcccggttttcgccgtttgggtatcagtcagggcggggcactggatttacccgcgctgaaaatggctaatatgttggtggggaatgcccccgctgccgcaggattggaaattacgctggggcagttttgtgccgaatttactcagacaggctggatcgcactaactggcgcgggctgtgatgccaggctcgacgaccaattactgtggaccggctggcgttatccggtgaaagcgggccagcgtattcaacttaatgtcccattgcggggaatgcgcagttatctggcgatctccggcggtattgacgtgcctgaaatgcttggctcgcgcagcactgatctgaaagccggatttggcggtcatcaagggcggttgattaaagagggcgacgaattgccgttgggcaaagcgagccgtttacctaaggaatccgttggcattaaacaattactgtttggtaatcgagtgcgggcggtgccggggccggaatatcacgagttttcgtccagtgcgcaagaggcgttttggcgcagtgcgtggcagctgagcccgcaaagtaatcggatgggctaccgtctgaccggcggcgagttatcccgcaataccgcgcgggaaatgttatcccacggtttactgcccggagtggtgcaggtgccgcataacggccagccaattgtattaatggcagatgcgcaaactacgggcggttatccgcgaattgcctgcgtgatcgaagccgatctcttccatttggcgcaaattcgtttgggagaaccggtgcattttgtcaaatgtacgctggaggacgctttgaaagccaaagccgaacaacagctgtatttgcaacagattgaacggggtttagccgcgggtttccacccggtggaggccaaatgaaagtagatttaaacgcagatttgggtgaaggctgcgccaacgatcgtgaattattgcagttagtcagttccgctaatatcgcctgcggtttccatgcgggagacgctgaaattatgcgccagtcggttcgttgggcgttggagtttcgcgtggctattggcgctcatcccagctttcccgatcgggagaactttggccgcaccgcgatgcaactgccgccagaaaccgtctatgcgcaggtgatttatcagctcggcgcgttggcggctatcgtgagggcggagggcgggcgtatgcagcacgtaaagccccacggcatgctgtataaccaggcggcgaaagatccgcagttggcagacgccattgctcaggcggtgaaagccgtcgattccaatttgcgtttggttggattggcgggtagcgaattaattcttgctgggcagcgcgcgggtttatctacccgacaggaagtttttgccgatcgtcgttatcaggccgatggttcgctggttccgcgcaacgagccggatgcgttgattgaaagcgatgaactggcattatctcaaacgctggaaatggtacagcagcggcgggttcagtcccgtgacggcatttgggtgccggtacaggcagataccgtttgtgttcacggtgatggcgcgcacgcattggcttttgctcgtcgcctctatgacagttttatacagaaaaatatcagcatcagtgcgagttgatagggcgtcaataatcataaccgcctagcccgggcggaataatagtgaacacttgatcagaacccaggataggagaatacatttggaacagaccgtaaatttctggccgcttattggtattgcggcaattatcatcggatttttaatgcgtattaatgccgtattggtggtgattaccgctggcattattaccggcgtagcggctttgatgcctattgccaccatattagagaaactgggtgaaggttttttgaatacacgaaacctgccgctgattttattactgccgctggcggtaataggtttattggagcgccacggcctgaaagaacgggcgcaggcgtggatttcaaaaataaaaagcgccacctccggtcggctgctgatcgtgtacctgtttgtgcgtgaagccacagcagcgctggggttaaccagtctgggcggacatccgcaaatggtccgtccattattggctccgatggccgaaggtgcggcggaaacacgttatggcgagttaccggagaaagttcgctaccgtttgcgcgctatgtcggcggccacggataacgtgggattattttttggggaagatatattcgtcgctttcggtgcgattatctttatgcataactttatgttggaatctggcggtattcaaaccgaaccgctgcatattgccctgtggggtattccgactgcgatttgtgcatttatcattcacgcatatcgcttgcagcgtttagataaacaattggcggcagaactgacggcgctgaatcagtcggcattagctgagaaaggggcgtcgaaatgattttccaacaacaatatctctattggctggcgggcgtagtgctgctgattgtcgccttgatgtcatttcgcgataaagctaacccgcgtcgaattaccaccggtttgttttggggattgtacggactgttttttctggtaggagactggacgtaccgtttggccaattcgctgggcggcgacggtccggatgaaaaacgcattctgaatatcaccgtgggcgtggtggtggtcattatggcgctgatcgccggttttggtggcgttcgattgggtagctatcatcagcgcacgccggtggaacgcgaagtgagcgctaagaaactggggaaccgcctgtttattccagcgctggcaattccagtcgtgacggttattggcgtactgttattcaacaacattccagcgttagatttgtgggtgtttggtagcggtaaccatgccactttggtgacgctgttctctatgactctaggctgtgtgctcggcctgattattgccgtggtgatgacgaaagaaaccgccgcgcagccggttcaggaagcgcggcgtttactggattccatcggttgggcctttattctgccgcagatattagccactttaggcctgttattcaccaccgcaggcgtgggaacggcgattgctcatttgacgcaagaatatctggctgtcgatcatcgctttatcgccgtagccgtctatgctatcggcatggcggtgctcaccatgattatggggaatgcgtttgcggcattccccattgtcaccgctgggatcgggatcccaattctggtatcacagcacggcggtaatccggcagttatggcggctatcgggatgttttccggctattgcggcacgctaatgacgccaatggcagctaactttaatatcgttccggcagcgttactggagttgcctgacaagaatgcggtgattaaggcgcagattccaaccggcgtaactttattgattgttaacgtattcttactgtatttcctgatgttcctgtaggagaagtgatgaaaaacgtattaattaccggttttgagccttttggcggcgagcgggtcaatccgtcgtgggaagtggtcaagcaattgaatgatttgcagctttccggcgttcgggtggtggctcatcagctgccctgcgcttttggcgaagccttaacatcgctgaatgcggccattgatgccactcagccggtattggttctggctattggacaggccggtggtcgtgcagatatcaccattgaacgcgtcgcgatcaatgtggatgatgcgcgtattgcggataatctgggacaacagccggtagaccagccgattgtgcctgatggcccggtggcgtactttacccgtttgcccatcaaagccatggtgcagggaatccgcgaggcgggaataccggcgtcggtttcccaaacggctggaacctacgtgtgtaaccatgtgatgtacggtctactgcatcgtttacatcaacaggacaacgaggtgaaagggggatttattcatatcccttatttgccggagcaggcggtaaaccaccccggttcgccaagtatgtcggctcagtccgtcctgatcgcgctggaagttgctatttctgtggcgttgcaaattgaacatgatttgcacatatccggcggcgcgacacactgatccctattggaataatcaataaaaaagcggagggcgacttccgctttgtcgttttaaggaggagcagaatgccggaaggcccggaaattcgtcgcgctgcggataaacttgccgaggcggtgataggcaagccgttgaaacaggtgtggtttgcttttcctcagctcaagccttatcaatctttgctgcttaatcagcaggtcaatgaaatacaaactcggggcaaagcattgttgacgcatttctccgatggattgacgctgtatagccataatcagctgtacggagtctggcgagtggttaaagcgggagaaacgccacagactaagcgagatctgcgaatacgactggaaacggccgaccaggccattttgctctacagcgcctctgatatagagattgggccgcgtgaagtgattgaacaacatccctttttgcagcgtattggcccagatgtgctggatatggcgctcacggaaaatgacgtgattgcgcggttattgtcgccgcagttttgccgtcggcaattgggcggaatgctattggatcaggcatttttggcgggattaggcaattatttacgcgcagaaattctgtggctggcggcgttggcaccaacgcataaaccgcaggatctccccccagaggcattgcaggcgttggcttcggcgttattggcggtgccacgcctttcctacgcgacgcgcggcgtagtggatgaaaatcatcatcacggcgcattattccgtttcaaggtcttcaatcgtaccggccagccttgcgcgcgctgcggtgagccgattgaaaaaattgctatttcttcgcgtcctttctattggtgtccggcctgtcagcattaattatcaatgataaaacgcgtttttcagccataaaaaacgccactgaaaagtggcgtttgatgatcgggtcgcgcctagattcagtgcgcgacgggagtcaatttacttcttgatttggctagtgaaatcgcgttctgcgtagccggtgtacagctggcgaggacgagcgattttcaggccttcatcatgcatttcgttccagtgagcaatccagcctatggtacgggcgatagcaaagatcacggtaaacatggaggaaggaatacccagcgctttcaggatgatacctgagtagaaatctacgttcgggtacagtttcttctcgatgaagtacgggtcattcagggcgatacgttccagctccatcgccacttccagcaggttgtcattcaggttgagttctttcaacacttcatggcaagtctcacgcatcacggtagcgcgtggatcgtggtttttatacacccgatgaccgaagcccatcagacggaaggagtcatttttgtctttggcgcgacggataaattcaggaatgtgctcaacggttttgatttcttccagcatcttcaggcaggcttcgttcgcgccaccgtgagccggtccccacagggacgcaatcccggcagcaatacaggcaaacgggttagcgccggaagaaccggcggtacgcacggtagatgtggaggcgttttgttcatggtcagcgtgcaggatgaagatgcgatccattgcgcgttccaataccggattcactttgtattcttcacatggagtagagaacatcatgtgcaggaagttaccggcgtaggacagatcgttacgtggataaacgaaaggctggcctagggaatatttgtaacacattgcggcaaccgttggcattttggacagcaaacggaaagcggtaatttcgcggtgacgctcgttgttaacatccagtgcatcgtggtagaaggcagccagtgcgcctgtcacgccgcaaagtacggccattggatgagagtcacggcggaagccttgcagcagtcgggtaatctgctcatggatcatggtgtgacgggtcacggtagttttaaacgtggcgtattcttccggcgttggcgtttcaccgtacagcaagatatagcacacttccagataggtagattctttcgctaactgatcgattgggaagccacggtgcagcaaaataccgttatcaccgtcgatgtaggtgatttttgattcgcaggacgcagtggaggtaaaaccgggatcaaaggtgaaatagcctttggaacctaaggttcgtacgtcgataacatcggtacccaaagtcggggatagtacgcccagttcaatcgtagcttcgccagtcaaagttagcgtcgctttcttgtcagccatttacagtctccttagcgctatattttaaaatccttaacaaccgtaatgtcttttgtgcctgcggcatgccttatcggttatcagcagcaccctgttttattcatcgttcaagtcgcgatttagggtacagagcatgttgctaatagaaccaacaatccggcacgttggagtgtcaggcgacgttacgtgattgttaacgatttgtcggatacttatatttttctaatcattgcctacgagattattaggggtatttacttacacactgttgcacaacttatgtccataaggaagtgtatccgtagacctttcgtgcatcatagggcttatttatcccttagttgtaatggaaatgtttattctttgtcaaatcagataattaattttatttaaattgtgtaaatcgtgatcctaatcactgttcaaggcaaatgttatcaatcagtttgtgtgggaattgtaataagaatgtgaaccccctatactgccgccaggtctccggattaccctgaagtaggagcacccagcgttatacagagcacacattttttgacactcaggacgtaatgtgaaatttgtgatgtgaagggttacgactcataacgctgtctgatccccgcccaggccggaggaaggaaaataataagagctgtgtgggcaaaaccgtgaaaaaacaaagacctgttaacttggatctgcaaaccatccgatttcctgttactgcgatagcgtccatcttacatcgagtctctggcgtcattaccttcgttgctgtgggtatcctcctctggctactgggtctgtctctctcgtcctacgagggattcctgcaggcctccgccatcatgaatagctttattgttaaattcatcttctggggaattctcactgcgctggcctatcacattgtcgtgggcatccgccacgtattaatggattttggctatctcgaagaaagtttagcggcgggtacccgttctgcccaagtggcgatgggcatcaccctggtgctgtcagttctggctggagtcctggtatggtaagcaatgcttctgcgttagggcgtaatggtgtacacgactggctgcttctgcgcgcgtctgcgatcgtcattaccctatatgtactctacatcctgggctttgttgccattgccccggacatcacctacgaaatctggcgtggcttcttcgcctcttccatcaccaaagtctttaccttgctgacgctgctgtcgattcttgctcacgcgtggatcgggctgtggcaggtattaacggactatataaagccattagcgttgcgtctggtcttacagctggtcgtggtgattacgttattggtttacttactgtacggaactattgtggtgtggggagcttaaatgaaactgccagtcagagagtttgacgctgttgttattggtgcaggtggcgcaggtatgcgcgcagccttgcagatttctcaaatggggttgtcttgcgccctgatttccaaagttttcccaacccgttctcatacggtatctgcgcagggcggtattaccgttgcgctgggtaacacccacgaagataactgggaatggcatatgtacgacacggtgaaaggctccgattatatcggtgaccaggacgccattgaatatatgtgtaaaaccggcccggaagcggtgctggaactcgaacacatggggctgccgttctctcgtctggaagatggctccatttatcagcgcccgtttggtggccaatcactgaacttcggcggcggtcaggcggcacgtaccgctgcggcggctgaccgtaccggccatgcgctgttgcacaccctttatcaacaaaacctgaaaaaccataccactatcttctccgagtggtatgcgctggatttggtgaagaatcaggatggcgcctttgtcggctgtaccgcaatctgtatcgaaaccggcgaagtggtttatttcaaagctcgcgcgacggtattggctaccggcggagcagggcgtatttaccagtccacaaccaatgctcacattaataccggcgacggcgtcggcatggctctgcgtgccggcgttccggtgcaggacatggaaatgtggcaattccaccctacgggcatcgcgggtgctggcgtactggtgaccgaaggctgtcgtggtgaaggcggttatctgctgaacaaacacggtgaacgctttatggaacgctatgcgccaaacgctaaagatttggccggtcgcgacgtagtagcccgttccatcatgatcgaaattcgtgaaggtcgtggctgtgacggtccttggggcccacacgccaagctgaaactggatcatttgggtaaagatgttctggagtcccgtctgccgggcattctggaattatcccgcacctttgctcacgttgatccggttaaagagccgattccggttattcctacctgccactatatgatgggcggtattccgaccaaagtgaccggtcaggcgattaccgtgaatgaaaaaggcgaagacgtcgtgattccgggtctgtttgccgtcggtgagattgcctgcgtatccgtccatggtgcaaaccgtctgggcggcaactcgctgctggatctggtggtatttggtcgagcagccggaatgcacttgcaggaatccttaatggagcaagggccaagccgtgatgccagcgattcggatattgaagcctcgttggatcgtatgaaccgttggaataacacgccaagcggtgaagatccggtggaaatccgtaaagccttacaatcttgtatgcagcataacttctcggtattccgtgaaggtgatgccatggcaaaagggttggaagaactgaaagtgattcgtgaacgcctgaaaaatgcgcgtctggacgacacttccagcgaatttaacacccagcgtatcgaatgtctggaactggaaaacttgatggaaacagcgttttccacagcggtgtccgcaaacttccgaaccgaaagtcgcggtgctcatagccgtttcgacttcccggagcgtgacgatgcgaactggctgtgccactcgttgtatctaccgcaaaccgagagcatgacccgccgtgaggtgaacatgcagccgaagctacgcgcggcgttcccgccgaaagtgcgttcttactaacgcgtttgccgagttaacccgttgcggaggagtgagtcatgaaactcgaattttcgatttatcgttataacccggacgttgatgatgcgccgcatatgcaggattacagcctggaagcggaagaaggccgggatatgatgctgctggatgcgctaattcagctgaaagaacaagatcctaccctgtctttccgtcgctcctgtcgtgagggcgtgtgcggctcagacggattgaacatgaacggtaaaaacggcctggcctgtattacgccggtttcggcgttaaccaatggtcgtaagaagattgttattcgcccgttgccgggtttgcctgtggtgcgtgatttagtggtcgatatgggccagttctacacccaatacgaaaaaattaagccttacctgcttaatgacggcaaaaacccaccggcgcgtgagcatctgcaatctccggaagagagggcaaaactggatggtctgtacgaatgtatcctgtgcgcctgctgctcaacctcttgcccgtcgttctggtggaacccggataagttcgttggacctgctggtttactcgctgcttatcgcttcctgatcgacagccgtgatactgaaacgcagtcgcgtttagacgaccttaacgatgctttcagtgtcttccgttgtcacagtattatgaattgtgtgagtgtttgcccaaaaggccttaatcctactcgcgcaataggccatattaagtctatgttgttgcaacgaagtgcatgatgtgagtttataaacccggggaataattttcccgggtgataataaaggtagggaatctctaaaagccgacgctgttgtctgtttctagaggttccttgaaagggaccgataaggtccatagcagaacgtgcattgagcacgtcgagtgaaccgtttttacggcaaaccgtttacttcacggtatatatgttaaccacggcgaaaactgaagcttcaaagcttaagggatcatgatgcagaacggcgcaatgaaggcctggctggattcctcctatctggcgggcgcgaaccagtcctacatagagcagctctatgaagattatttgacagatcctggttccgttgatgatagttggcgttcgatttttcaacaactaccttctacgggtgtaaaacctgatcaattccactctcaaacgcgtgagtacttccgtcgactagcgaaagataccacccgttataactccgcgatcaacgatcctgatactgatgccaagcaagttaaggtgttgcagttaatcaacgccttccgcttccgcggccatcagcatgctaatctcgatcccctcggtttatggaaacaggaagaggtgccagatctcgatcctgcttaccacaacctgactgaagcagacttccagaacaccttcaacgtgggttcttttgccatcggcaaggaaaccatgaagttggccgatctgtatgccgcactgaaacagacctattgcgggtctatcggtgccgagtacatgcatatcaccaacactgaagagaaacgctggattcagcaacgtatcgaatctgtcgtagggaaaccaacgttcagtgatgaagagaaacgtcgtttcctgagcgaactgaccgctgcggaagggttggagcgttatctgggagccaaattccctggtgccaaacgattctcgctggaaggcggcgattcgctggtgaccatgttgaaagagatgatccgtcacgcaggtaaaaacgggactcgcgaagtcgtactggggatggcgcaccgtggccgcctgaacgtcctgattaacgtgctgggtaaaaaaccggaagatttgttcgatgaatttgccggtaaacataaagaacatctgggtacgggtgacgttaaatatcaccagggtttctcctccgatgtagaaactgaaggcggcctggttcatctggcgctggcctttaacccgtctcatttggaaatcgttagcccggttgtcatcggttccgttcgcgcccgccgcgatcgtctggataaagctcgcagcaatatggttctgccaatcaccattcatggtgatgcggcgattaccggtcagggcgtggttcaggaaactctgaacatgtcgcaggctcgtggttatgaagttggcggcaccgttcgcatcgtcatcaacaaccagattggtttcactacttccaatccgcaagatgcccgttcgacgcagtactgtaccgatatcgcgaaaatggtgcaggcgccgattttccacgtcaatgctgatgatccggaagccgtggcgtttgtaacccgtctggcgttggatttccgtaacacctttaaacgtgacgtgatgatcgatctggtctgctatcgccgccacggccataacgaagccgatgagccaagcgcaactcagccagtgatgtatcagaagatcaaaaaacacccgacgccgcgcaaaatctatgctgacaagctgactgagcaaaaaattgccagcctggaagatgccacggaaatggtcaacctgtatcgcgatgcgttggatcacggagattgcgtggttgaagaatggcgtccgatgaacctgcaatccttcacttggtcaccgtatctgaaccacgagtgggatgaagaatatccgagcaaagttgagatgaaacgcctgcaagagctggcgcgtcgtatcagccaggcgccggacgctatcgaaatgcagtctcgcgtagcgaaaatctacggtgaccgcgctgaaatggccgcaggcaacaaaccgttcgattggggcgctgctgaaactctggcctacgccacgctggtagatgaaggtattccgattcgtctttccggtgaagatgcggggcgcggtaccttcttccaccgtcacgcagtgattcataaccagaaaaacggctcggtgtatgtgcctttggcaaatattcacagcggtcagggtgatttcaccgtttgggattccgttctatcagaagaagcggtactggccttcgaatacggttacgctaccgcagaaccgcgtaccctgactatctgggaagcgcagttcggtgactttgccaacggtgctcaggtggttatcgatcagttcatcagttccggcgagcagaaatggggccgtatgtgtggtctggttatgctgttgccgcatggttacgaaggtcagggtccggagcactcctccgcccgtctggaacgctatctgcaactgtgtgccgaacaaaatatgcaggtgtgcattccttctacgccagctcaggtttaccacatgctgcgccgtcaggctctgcgtgggatgcgccgtccgctggtcgtcatgtcaccgaaatccttactgcgccatccgttggctgtgtcttctctggatgaactggctaacggtactttcctgccggcaatcggtgaaatcgacgaattggatccgaaagcggtgaaacgcgtagtgatgtgctctggcaaggtctactacgatctgctggaacagcgtcgcaagaacgatcagaaagatgtcgctattgtacgtatcgagcagctttatccattcccgcatcaggcagttcaagcggttctggaacagtatgcccacgttcatgactttgtctggtgtcaggaagagcctctgaaccagggtgcctggtattgcagccaacataacttccgtgaagtgattccttttggttcctctttacgctatgccggccgtccggcctctgcctctccggcggtaggttatatgtctgtacaccagaaacaacagcaaagtttggttaatgacgcgttgaacgtcgaatagctaattgtttaaaacacaagggatagataatgagtagcgtagatattctggttcctgacctacctgaatccgtcgcggatgcgacagtggccacctggcataaaaaaccgggcgacagcgttcaacgtgacgaagtcctggtagaaatcgaaactgacaaagttgtgcttgaagttcccgccagcgaagcagggattctggactctattctggaagacgaaggcgcaaccgtgctttctcgccagattctgggtcgaatccgtccgggcgatagctcaggtaaaccgacagaagagaagatccagagcaaagaatccacccctgctcaacgtcaaaccgccagtttggaagaagagagcaatgacgccctcagcccggcgattcgccgcctgattgcagaacattctcttgatgccagcgctattaaaggcagcggtgtcggtggtcgtattacccgtgaagacgtggaacaacacctggcgaacaaaccggcagcgccgaaagccgccgaagccaaagtggaagttgccgcacctgcattgggcagccgcagtgaaaaacgtgtaccaatgacccgcttgcgtaaacgcgtggccgagcgtctgctggaagcgaaaaacagcactgccatgttgacgactttcaacgaaatcaacatgcagccgatcatggatctgcgcaagcagtacggtgaggctttcgaaaaacgtcacggtgtacgtttgggctttatgtccttctacatcaaagcggtagttgaagccctgaaacgttatccagaagtgaacgcttctatcgatggcgaagacgtggtttatcacaactacttcgacgttagcatcgctgtttctactccacgtggcctggttacaccggttctgcgtgatgtagacacactgggcatggctgatatcgagaagaaaatcaaagaactggctgttaaaggccgcgatggcaaactgaaagtggaagaactgaccggcggtaacttcactattaccaacggcggcgtgttcggctccttgatgtcgactccgatcattaacccaccacaaagcgcgatccttggtatgcatgccattaaagatcgtccaatggcggtaaatggtcaggtagtgatcttgccaatgatgtacctggcgctctcttacgatcaccgtttgatcgatggccgtgaatctgtcggctatttggttacggtgaaagagatgctggaagacccagcacgcctgttgctcgacgtataaaaaagataacggttaaaggctgcctgacggttggggaatatcccgatctgtcaggctcctgacgccataaatctagtgttaaaaaacctatgtgttaacaaaaacctatgtgctaattgcggtcgatcccagggtcggcattatccagacactgcggggctcgtcccgtctacagacttaaatggatagaacatcatgaatttacacgaatatcaggccaaacaactgtttgctcggtatggtctgccggctccaaccggttacgcctgtaccacaccccgtgaagcagaagaagccgcatcaaaaatcggcagcgcaccttgggtggtaaaatgtcaggttcatgctggcggtcgcggtaaagcgggcggcgtgaagctggttaatagcaaagaagaaattcgtgcttttgcggaacactggttaggcaagcagttggtcacttaccaaactgacgcccacggccagccggtacaccagattctggtagaagccgcgaccgatattgataaagaactgtatctgggcgctgtagtcgatcgcggttctcgtcgtgtgatcttcatggcttcaaccgaaggcggtgttgaaatcgagaaagttgcggaagaaacgccggaactgatccacaaaattgctctggatccactggcgggtccgcagccataccaaggccgtgagttagccttcaaactgggtctaaccggtaaacaagtcagccagttcaccaagatctttatgggtctggcagcgctgttcctggaacgcgatctggcgatggttgagatcaacccgctggtgatcaccaaacaaggtgatttggtgtgtctggatggcaaactgggtgcggacggtaatgccctgttccgtcaaccagagctgcgcgaaatgcgtgaccagactcaggaagacgcccgtgaagctcaggctgcgcagtgggaactgaactacgtcgcgctggatggcaacatcggctgcatggtcaacggcgcaggtctggcgatgggtactatggacatcgtgaaactgcacggcggcgaaccggctaacttcctcgacgttggcggcggcgcaaccaaagaacgcgtaaccgaagcctttaaaatcattctgtccgacgacaaagtgaaagcggtgctggtcaatatctttggcggtatcgtacgttgcgatctgattgctgacggcatcattggtgcggtagcagaagtgggtgttaacgtaccggttgttgttcgtctggaagggaataacgctgagttgggtgccaaaaagctggcagacagcggcttgaatattattgctgcgaccagcctgacagatgcggctcagcaagttgttgcggcagtggggagtaaataatgtctattttaatcaataaaaacaccaaagttatttgccagggtttcaccggcggccaagggactttccactccgaacaggcgattgcttacggcactaaaatggttggtggtgtaacgccaggcaaaggcggcactcagcatctgggtctgccggtatttaataccgtgcgtgaagccgtggaagcaaccggtgcgaccgcttcggttatctacgtgccggctccgttctgtaaagattccatcctggaggcgattgacgcaggcattcagctgattatctgtatcactgaaggtatcccgacgctggatatgctggttatcaaagtgaaactggaagaaagcggcgtgcgcatgatcggtcctaactgtccgggtgtgatcaccccgggtgaatgtaaaatcggcatcatgccaggccatattcatctgccaggcaaagtgggcatcgtttctcgttcgggtaccctgacttatgaagcggttaagcagacgactgatattggcttcggtcaatcaagctgcgtcggtattggtggcgatccgatcccaggctctaactttatcgatatcctgaaactgttccaggaagatccgcaaaccgaagtgattgtgatgatcggtgagatcggcgggaccgcggaagaagaagccgcagcctacatcaaagatcacgtcaccaaacctgttgtgggttatatcgccggtgtgactgcgcctaaaggcaaacgtatgggccatgctggcgccatcattgccggtggtaaaggtacggctgaagacaagtttgcggctctggaagcggcaggcgtgaaaacagttcgtagcctggccgatatcggtgacgcggtgaaagaagttttacctcagtaagctgacttaagtcattcgagcggcggcaagagggtagacaggtgaacccgatgagtttaggcgactaagtgatttgggcgatcgggttaagccaacgcagaggcagcttgaggcatacaggtctagatatagataaaaataacgattagctcgacatatattggccaccttccggtggccttttttttataaagaaaccgcgtgaaccttccgatatcgcagaattcccctccgttagagaggggagggcatcagaaattattcagggcggtaatcagtatcatatccgtttgtgcctgctgcttagcttgctcgcttttagcgttgccaagctgctgctgaagtgacgccagcgctgcgttatagctggctttatcgctaaacagcttatccttaacgttaatcgatgcgatattggtaaaacgtccgtcttcggtggtaggaaccgctattttcccttcattgattagctttttcaccacttctcgctgcggttcataaccttccaatccaaccagcttccaacgttgctcggtttttccttggtattgaccgtgtttgacctcggttagataacggatggtcagattacgaatggtgccgtcctcttcgccatattctgccttagtatcggaaagtaccgggaactgctgacccgccagtacaccacctttctgagtcaaatgtcccattcgatagctgttcattcctaagcgaattggcgtgctatcggtaacggcttcgccatggttaaaacgtaaattggtgatacgtgaacccgcaggttggcgtaggtcgatggtgtaggtgacgccatcaaagaaatcattggtggaatatttagacgcgcgacgttgcggattaaaactgtaggtgacatcgcccggtttaacctgattgaaataatcggctgaccactccatatattttttcagttctttacccgtaagctgataaaccgttatttccccgccggcgtattgatagttaaaagcaatatctttagcttttatctcacctaaatctaatttagctcggtcattatcgatctgtaaggcaataacttgcgctttaggcgcatagtggcgtgcggcttcctggaacagagcactgataccggtatcctgaatatgtacttgcggaatgccttttatctcatctttaggcactaagtctactccgcttagggtcgcaataacccgatttgcattggcgcgcaaaatactgtgataaggctgataaatagcttcaagttctttatcagaatgaattcctttgatggggtaggtataactgtctttattgattaaatgatattttccatcccgctgttcaaattgcaaatcgatacgggaaagggcgcggccatatttatccggttcagtaataataacgccgttcactacggccttatcaattttgacgtgcatatggcccgcgactatggccgctagctccgggttggctttggcaatgtcccccacgccagtaccgggacgctggttctcgttatcaatccccatatgggcaaccagcacgatagcgtcgacctgcggctgaatttgttgaatcaccttcttaacttcttgcacaggatcggtaaaattcagccccttgatacgatcggtaccttgggcaaattccgctgtcattggcgtatccataccgatgatgccgattttgacgccctggcgttcgataatcttataagagggcaggtaaggcttgccgctgtcccagaagatattccccgccagagcggtacctttaaactggtttaaagaggtggatagaaccttcagaccgaaatcgaattcgtgattacctagcacccaagcatcgtaattcagggcgttgaaaccgagcatcatcgggctgacggcctcgtttttaaaggtttccacgaagttgccctgaatggtatcaccggcgtcaaccaaaatgatattgggctgttcggcgcggatttttttcacctgcgtggcgatttggctcaggctgccggccagattttcactgtcgctggcatagtcccagggaacgaaggtgccgtgcagatcggaggtacctaaaatcgtcaggttgacagtttcagcggcgaaggaggaagaggtgctgatacaaagtaaggaggcgagcgctatttttttcattttaatcttcttgaaggggccaatgtttcatcatgtaaccgaattttatgatgcaacaaaatagcaacacaagcgaacgcttccccaagaatcgattaatatattcatataaattgttaagttgtgattcaactcaccatgaagattataaattaaaaaagttaatcttgatcgcggaaaaatgaaaaaataaatcattacttaaaccattaaatcacatttatttaacactggaggtttatataaaaatatttgaacgattaattaacacctccagaagaaaattgttctaaatcaagttttcaatatggcaataatgttcatatgagcttaaattgttctggatcaatttgtcctgctatcgataattagttggtttgttgacctgtatccagaactcaaagccaggtcacgtaaaatcctatttattgtatgggattagaagcgtactattatcgcggtgtaatactgggtagttgatattgttatttttgttgtgtttttttgggcattcactgctggtagttatgagacttccaattatagcggaggtcgcgttgccgcaagtcggagtcttcctgcgaggagcaaggagtcaagatgtttgatattgtcgaactgtcacggttacagtttgccttaacggctatgtaccatttcctatttgtcccgctaacgctgggtatggcgtttatgctggcaattatggaaacggtttacgtactgtctggcaaacaaatctataaagatatgaccaaattctggggcaagttatttgctattaactttgctctgggggtcgctacgggtctgactatggagttccagttcgggactaactggtcatatttctctcattacgtcggtgatatcttcggtgcccctctggcaatcgaaggtctgatggcgttcttcctggaatctacttttgttggtctcttcttcttcggttgggatcggttaagtaaacatcagcatctggccgttacttggctggttgcattggggtctaacttctctgccctgtggattctggttgccaacggttggatgcaaaacccaattgcggcggatttcaacttcgaaaccatgcgtatggaaatgctaagtttctctgagctggttctgaacccggttgctcaggttaaattcgtgcataccgttgctgctggttatgttaccggtgcgatgtttgttctgggtatcagctcgtactatctgttgaaaggccgtgatattccgtttgccaaacgttcctttgctatcgctgccagctttggtttagccgcgacgctgtccgttattgttctgggtgatgaatccggttacgaaatgggtgacgtacaaaaaaccaaacttgctgcaattgaagccgaatgggaaacccagccgcctccggcagcctttacgctgtttgctattcctaatcaggaaaaaatggagaactcgttcgccattcaaattccttatgcattaggcttgattgccactcgttcattggatactccggtgaccggcctgcgcgatctgatgtcacagcacgaagtccgtatccgtaatggtattcaggcttatcgtttgctggaagaactgcgtgcgggtaacaccgatccggctgttcgtgccgagttcaacaaaaccaagcaagatctgggttatggcctgttgctgaagcgttacacgccgaacgtaactgacgctaccgaagcgcagattcaactggcagcaaaagactctattcctaaagttctgccgctgtacttcgcgttccgcatcatggtggtctgtggcttcctgctgttgctgattatcggtctctcgttctacaacgtatgccgtggtcgtatcggtgagaaaaaatggctgcaccgtctggcgctgtggggtattccattaccttggatcgcgatcgagtctggctggtttgtggctgagtatggccgtcaaccttgggcaatcggtgaggttctgcccactgccattgccaactcttcggtgacagcaggggatattctgttctccatggcgctgatttgcggtctgtatacgctgttcctggtcgcagaaatgtacctgatgttcaaatttgcgcgccttgggcctagtagcctgaaaactggccgctatcactttgaacagccgactgcgcctgcgcaagaagcacggtaaacgggagtccacttatgtttgattatgaagtattacgatttatctggtggctactgattggtgtgctactgataggtttcgccgtcaccgatggttttgatatgggcgtaggtatcctgctacgcattatcggtaaaaccgatactgaacgccgtgtcatgattaactcgattgctccccattgggatggcaaccaggtttggttgattaccgccggtggtgcgctgtttgccgcgtggccaatggtgtacgccgctgccttctccggtttctatattgcgatgattctggtgttggctgcgttgttcttccgtccggtcggttttgactaccgctcgaagttggaaagcagccgctggcgcaatatgtgggactggggcatcttcatcggtagcttcgttcctgctgtagtgttcggcgtcgcctttggtaacctgctgcaaggtgttccattccatatggatacctacatgcgcttgttctacaccggcaacttcttccaactgctgaacccgttcggcctgttggcgggcgtagtcagtctggccatgttggtgactcagggtgctacctacctgcaaatgcgtacccgcggtgaaattcatctacgttcccgcgctgccgcacagatttgtgcgttagtgatgggcgtagccttcctgctggcgggtatctgggtagtgaaaggtatcgacggttttgtgattacttcagcgctgaacaccgctgcggaatccaacccgatgcgtaaagaagtggcacatcaggcgggcgcctggttgattaacttcaacaagtacccaagcctgtgggcgctgccagcgttaggggtaatcctgccgttgttcaccatcctgttctcgcgtatggaaaaatgcgcgttggcgtttatctcctcgtcactgacgattgcctgtgtgattttgactgccggggttaccatgttcccgttcgttatgccgtcaagtaccatgccgaacgttagcctgacaatgtgggatgcgacatcaagcctgctgacgctgaaagtgatgaccattgttgcgattatctttgtgccgctcatcctgctctacaccagctggtgttactacaagatgttcggtcgtatcgataaagaatatatcgaaaacaacaagcactcactttactaaggagcataaagcatgtggtattttgcctggattctcggaacacttctggcctgctccttcggtatcattactgctctggcgctagagcagagtgaggccaatgcggcggagaagaaagccgctaaaaacggcagcgaagatgttgtccgataagttgtacgctttaatggataagggcccgctgcgggccctttcacttattctcgccttcacgctggctttctgtattttctgggacccgacgcgctttgccgccgccaccagttcgttagaagtctggcaagaggtgtttttagtgtgggctgtctgtactggggtcatccatggcgtaggttttcgaccgcagcgggtatggctgagagcttttttctcgcctcttcctgcaattgtgatcttaggcgcgggaattttccattttttcgcctaatcttgcagctaatcatccctatgggccgttcggcccataattattttcgttctcaccttgcaagtcattccaaaccgaatcgctcttcagtatagtgtgtccgttaattgcattactgggaagtagagtgagtaatacgttatttcgatggccggttcgtgtctactatgaagacaccgacgctggtggcgtggtttaccatgcgcgctacgtagccttttacgaaagggcgcgcacagaaatgctgcgccaacgcaattttcaccagcagcaattgttcagtgagcatattgctttcgctgtccgacgcatgacggtagagtatctttctccagcacgtcttgatgatatgctagaggtggagagcgaaattactgaaatgcggggggcctctctctcgtttgctcaacgaattttcgattcccatggcaatcttctgagtagtgcagaagtattggtcgcatgtatcgatctacacaaaatgaagccaaaagcgcttcccaagtctattgtcgcggagtttaagtagtggctgacatgaacattctggatttattcctgcaggcgagcctattcgttaagcttatcatgctggtactgatgggcttttccattgcgtcttgggcaattatcattcagcgaacgcgcgttctgaatgctgccacacgtgatgccgaagcctttgaagacaagttctggtccggcattgagctttcccgtttatatcaggaaagtcaggcgcgccgcgatagtctgggtggctcagagcaaattttccactctggttttaaagagtttgctcgtttgcatcgcgcaaacagccatgcgccggaagccgttatcgacggcgcctcccgtgctatgcgcatctcgatgaaccgcgagctggaagcgttggaaaaccatatcccgttcctgggcaccgtcggttctatcagcccgtatatcggtctgtttggtaccgtatgggggattatgcacgcctttatctccttgggcgcagtgaaacaagcaactttgcaaatggttgcaccgggtattgctgaggcactgattgctacggcgattggtctgtttgcggcaatccctgcggtaatggcgtataaccgcctgaatctgcacgtcagcaagcttgagcagaactatgacaactttatggaagagttcattgctattctgcatcgccaggctttcgccagcaccgagagcaaataagtagggggttgtatggcgcgagtacgtggtcgtagacgtcgcgagcttaagtctgaaattaacattgtgcccttgctcgacgtattgctggtattgctgctgatctttatggccacagcgcccatcattacacaaagcgttgaggttgatttgcctgacgctacggattcgaaaacggtatccagcgatgataatccgccggtgattgtggaagtttctggtgttggtcaatatacggtggtggtcgatcatcaacggatggagcagttgccagagcagcaggttgttgcggaagctcaggcgcgtctaaaagccaatccgaaaaccgtgtttttgatcggtggtgctaaagaagttccttatgatgaaatcatcaaggcgctgaatatgctccatcaggctggcgttacttcggttgggctgatgactcagccgatctaagtctgtgttgatgtcgattaagcgcgaaatatcgctgtatcggcattgaccctgtttttgaatatcgagtgtggaaatcgagcgtgggaaaggcaaccgagcaaaacgataagttgaatcgcgccgttattgtttcggtcgttctgcacattatattaattggcctgctaatttggggctcgttgacgcagaagactgaaatgggcggcggcggagctggcggcgaagtgattgacgccgtgatggtcgatcccggtgcgataacacagcaatataatcgccagcagtcacagcaggctgacgcgaagcgcgctgaagaacagcgcaagaaaaaagccgaacaacaggcagaagaattacaacagcagcaggccgcagagcagcagcgcctgaaagagctggaaaaagagcggctacaggcacaggaacaggccaagcagtcggcggaagaacagaaaaaagcggcggctgagcaacaaaaacaggccgccgaacagcaaaaacaagcggcagaggcagcagccaaagccaaagaagaacagaagcaggccgaagctgcggctgctaaagcgaaagctgaagccgagcaggtagtgaaagccgccgccgacgcgaagaaaaaagccgaagcagatgcgaagaaagaggctgccgtagcggcggcagcgaagaagcaggcagaggctgacgccaagaaagcggcagaagatgcgaagaaggccgcagaaaaagccgctacagaagctaaacagcaggccgctgaagccgcagagaagaaagctgccgccgacgctgagaaaaaggctgctgctgatgccaagaaagccgcagcagatgcgaaaaaagcggctgacgccaagaagaaggcggcagcagaagcagcgagtgctacggatgttgacgatctctttggtggcctggcgtcatccaagaatgcgccaaaaagtggtactggcgcaggtgaagccgcagcaggtaaaggcggtggcaagaaaagcggtgcgtcgggtgcagaaatcagcggctatttaggccagattactgcggcgattcagagtaagttttatgatgcagacttgtacaaaggccgcacgtgcgatctccggattaaactggcaccggacggtctgttgatagacgtaaaagcggaaggtggcgaccctgcattgtgtcaggccgcgatagccgcagcgaaacaggctaagattcctaaaccaccgagtaaagatgtttacgaagtatttaagaatgcgccggtttcctttaagccacaataagtgttgattaacggggtataagtttgttaatcaaccacggattatgtagttttgtttgcgttggtttgttaaaattctgctaattatcgcgggcattccgctcggataagggagacaagatgaagcaggcatttcgagtagcactaggctttttagttttatgggcatctgtgttacacgcagaggttcgcattgagataacccaaggggtggactctgctcgtccgatcggcgtagttccgttcaaatggatggggccgggtacgcctcctgaagatatcggcgctatcgtgggtgcagacttacgcaacagcggcaaattcaacccgattgacgtggcgcgtatgccgcagcagccgtctaccgcagcggaagtgacgcctgcggcatggactgcattaggcattgatgccgtggttgtgggtcaggtacagccgggcgctgatggcagctatttggtttcttaccaattagttgatacagcaggtgcagcgggaagtattttggcgcagaatcagtataaaataaccaagcaatggttacgttattctgcccataccgccagtgatgaagtatttgaaaaactgaccggtattaaaggggcgttccgtacgcgtattgcctatgtagtgcaaactaacggtggcaaattcccgcatgaattacgtgtttcagactacgatggctacaatcagtttgtagtacaccgttctcctgagccactgatgtcaccggcctggtcggcggatggcagcaaaattgcttatgtaacatttgagagtggcaagtctgcactggttattcaaacgttggcgaacggcgcaatcaaacaggttgcttctttccctcgtcataacggtgcaccagcattctcacctgacggtaccaaactggcgttcgctttgtctaaaagcggtagcctgaatctctacgtgatgaacctggcgtctggccagatcagtcaggtaacggatggccgtagcaacaatacggagccaagttggttcccggacagccagaatctggcttacacctcagatcagggtggccgtccgcaggtgtataaagtgaatataaacggcggtgcgccgcagcgtatcacgtgggaaggttctcagaaccagaacgcggacgttagcgctgatggtaagttcctggcactggttagctccagcagtggaacccagcacatcgccaaacaggatctagaaacgggagccgttcaagtgttaacggacacgttcctggatgaaacgcctagtatcgcgcctaacggcaccatggttatctatagctcgactcaagggctaggttccgtgttacagctggtctcgactgatgggcgtttcaaagcgcgtcttccggcaactgatggacaggtaaaattccctgcctggtcgccgtatctgtgatgcatgtgtaaatacgtatgtatggcaaactataaaaaaggatcaaagagatgcaactgaacaaagtgctgaaagggctgatgttggcattgccagttctggctatcgctgcttgtagttctaacaaaagcgcaaacaatgaccaatctggcatgggcgctggcactggtacagaaagcagcaacctgtcttcagaagagcaagctcgtctgcagatgcaggaactgcaaaagaacaatatcgtttacttcggcttcgataaatacgatatcgcttctgacttcgctcaaatgctggatgcacatgctgcattcctgcgtagcaacccgtcttacaaagttgttgttgaaggccacgcggatgaacgcggcacgccagaatacaacatcgctttgggcgagcgtcgtgctaacgcagtgaaaatgtatctgcaaggcaaaggcgtttctgctgaccaaatctctatcgtatcttacggtaaagaaaaaccagcggtactgggccacgacgaagcagcattcgctaaaaaccgtcgtgcagttctggtttactaagagaatcgcatgaacagtaacttcagacgtcacctgttgagtctgtcgttactggttggcgtagcggtcccatgggccgctactgcccaagcgccaatcagtaatgtcggctccggctcggtagaagatcgagtcacatctttagagcgtatttctaacgctcacagccagctattgactcaactccaacaacaactgtccgattcgcagcgcgatatcgatagtttgcgtggtcagatccaagaaaaccaatatcagctaaatcaaattgtcgaacggcaaaaacagatctaccagcaaatggatagtctgggcgggcagggtgcgcaaaattctgcgtctgctgcagctggcgcgtcgacagagagtgcggcgacaggtggtggttctgattctgcggcgggtgcagcggctaatacagccgcaccggcaagcagtggtgatgagaacagcgactacaacacggcagtttcactggctcttgagaagaagcagtacgatcaggcgatcgttgcttttcaaaactttgtgaaacagtacccaaaatcgacttaccagcctaacgccaactactggttagggcagttgtattacaacaagggtaagaaagatgatgctgcgtattactacgctgttgttgtaaaaaattatccaaagtctccgaaaagtgcagatgcaatgtataaagttggggtgatcatgcaggaaaaaggccagggcgataaagccaaggcggtttaccagcaagtgatcaagcaattccctaacactgatacggcgaaacaagcgcagaagcgtttatctgctctttagtctttttaagcccagtaattggtctgatcggctaatttctgggcttgatcgtgtgaagaacaagcagttaaacgattgattcgaaatttaagttgcgctgcgaagaaaaattagtaatatatgccgccgttgccaagacaacttgcaaaacgttaaagcgacgaaaaaatagcttcatataatgggtcgttagctcagttggtagagcagttgacttttaatcaattggtcgcaggttcgaatcccgcacgacccaccatgatgaagtgatgtactgtttcaaatcgtagggatgagaaccgtgaaggttcgagccgaacgaagtgagacagcaacgcgaaggcgttgccccgtaagggtgagtccgcaggacgaatcatcccgcactttcaccattatgaagtgttaaaagtaaagtagttgagtagtaccgcatcacagcgggtcgttagctcagttggtagagcagttgacttttaatcaattggtcgcaggttcgaatcccgcacgacccaccattctttcctaattggctggaatgaaaagaagttgaagttatcgcagcgatattcctcttcctgttttgtctggttttattctctaagtgttgtaatgcaataatacataatgggtcgttagctcagttggtagagcagttgacttttaatcaattggtcgcaggttcgaatcccgcacgacccaccatgatgaagtgatgtactgtttcaaatcgtagggatgagaaccgtaaaggttcgagccgaacgaagtgagacagcaacgcgaaagcgttgacccgtaagggtgagtctgcaggacgaatcatcccgcactttcaccattatgaagtgttaagagtaaagtggttgagtagtaccgcatcacagcgggtcgttagctcagttggtagagcagttgacttttaatcaattggtcgcaggttcgaatcccgcacgacccaccatgatgaagtgatgtactgtttcaaatcgtagggatgagaaccgtgaaggttcgagccgaacgaagtgagacagcaacgcgaaagcgttgacccgtaagggtgagtccgcaggacgaatcatcccgcacgacccaccatgatgaagtgatgtactgtttcaaatcgtagggatgagaaccgtgaaggttcgagccgaacgaagtgagacagcaacgcgaaagcgttgacccgtaagggtgaatccgcttgacgaatcatcccgcacgacccagcattcccttctagttcagtcaactccccaaagaaagaacaatctcatactgtacgatttgtgtggtgcgataacacttcatgccagttttgaacaacgcttgcgttggcccgaagggcgagtatcaggatgatacgagtcacctgcgttcagattcgatccgtgagttgtgagtctgtgaaaatagtcaggcttaaaccttttatctcagctctgttattaatagcctccaaatcgtctctctatggcgctgtcagcgatcaaatacttcctttgccacctaagtctttttcatagactgcgccagatacgggctgctgtggctctttccattggatctaaacctggttgactcgtcgatcataattctaagctcggtaaaaccataaatagaaacgattcatctactatttttaactctattaaacatatttcgcatatatcaacaaattcgggcgactttcactcatgttttgggtattttgtttaggataaaaaacaaaatcccttattttatgtataacagcgtgagtaaccggtgtttttccatataccttgcgatgagatgtgagcgatgagcgaaatttttgatataaatgcggcgatttatcccttcccggcgaagccggcgcccttaaatctcgatgagaaggctttttatcgtcagaagatcaagatgttgctgaagcagcaggatgctgtattggtcgctcattactataccgatcctgagatccaatcgctggcggaagaaaccggtggttgtgtggccgactctttggagatggctcgcttcggcaacacgcatccggcttctacgctgctggttgccggggtgcgttttatgggtgaaacggcaaaaattcttaaccctgagaagcgggtattaatgcctactctcaacgccgagtgctctctggatttaggctgtccggccgatgaatttgctgcgttttgcgatagccatcctgatcgtaccgttgtggtgtacgccaacacttccgcagcggttaaggcgcgggcagactgggttgtgacatccagtatcgccgttgagctgattgaacatctggacagcttaggtgagaaaattatctgggctccggatcgtcatttaggccattacgtgcagaagaaaaccggtgcggacgtactctgctggcagggggcctgtatcgtccatgacgagtttaaaactcaggcgttgatgcagatgaaggcgctacacccggatgctgccattttggtgcatccggagtctcctcaggccatcgtcgatatggccgatgctgtgggttccaccagccagctaattcaggcggctaaaacgttaccgcagcaaaaactcatcgttgccaccgatcgcggtatcttttacaaaatgcagcaagtttgcccagagaaagaattattcgaagccccgacagccggtgaaggcgctacctgccgaacctgcgcccattgcccgtggatggcgatgaatggcctgcaggcgattgctgaaggacttgagcggggcggggcactgcacgagatacatgtggatgaagaattacgtcagcagtcgctgattccgcttaatcgcatgctggatttcgccaatcagctaaaattgcagacacagagtaatgcctgaattccttaatccttattattggcgagagctatgggttttcggaaatggttcgttaaagcaacggattgataaatataaagtttggcaagtctaaagaggccgcttcggcggttaactaaaaggattatcggatggactttttcagtacgggtaacatattggtgcatatcccgctgggcgtacagggatacgatttatcgtggattgaagccattggcactttatttggtttgctgtgtatttggttcgccagcaaagagaaaattattaactatctgtttggcctgattaacgtgacgttatttgccgtcattttcttccagattcagctgtacgccagcctgttgcttcaagtgttcttctttggtgccaatatttacggttggtatgcgtggagtcgtcagaccaccgataatcagatcgagctgaaaattcgctggctttcactgccaaaagcgttgggatggggcgctgtgtgcgtcatcggtattgcactgatgacattcaatattgatcgcgtctttgcctggctgacaggaataaccgtcgccattatgcaggcattcggagccaacgttcaggtgccgcatttggaaccggattctttcccgttctgggactcaaccatgatggtgttatccattgtggcaatgattctgatgacgcgaaaatacgtggaaaactggctggtttgggtggttatcgatctgattagcgtggtgatttttacctatcaaggcgtttacgtgatggcgctggaatacgtcatcctgacgttgattgccctgaatggctcgtggctgtggattaaagccgccagagagaatcattcgcaaccattagccgttcagagttaagtcagtatttacttttgatataaaggcctgacagcggcattgcggctgctgtcaggcacggatactaacgatttagtggtgatgatggtgagcgctagcggaagtcgcggcttgattaatatcgcagtctggttcttcacagtgctgatattccatctgaatcgtggcgtgcccaatctgatagtgatgcagtaaataatgctgaatgcgttgcagcaactcatcgtgatcgcgcggcggaatcacctgcacatgcaaggtcatcacccgttgttcaccgactttccatagatgcacatgatgaacgttacggacttcactaatattcaggcagagcgatttgcgtaatttatcgatatccacatcctgcggtgcgccttccagcaattcatgaaaactctctttcagcaggccccacgcgctgcgtaaaaccagcattgaaaccagcacggacaagatcgggtcgataggcatccagccggtggttaaaatcacaattgccgccacaattgccccgacagagcctaaaaagtcaccgataacgtgcagcatggcagcgcggacgttgatattttgctcctcgccatcgccgcgcaaaatccacagagaaaataagttggctaacagaccagcaacggcgacgatcagcattggcgtgcccatcacctcatgcggcgtaaagaaacggctagcggcttcccataaaataaataccacgatcagtaataacgcggctgcattgacaaaggcggctaccgtcgttaagcgcagatagccaaaggtatggttggcgtcaggtttacggcgagaaaagcgaaccgccatcagtgcgataaatagcgcggctgaatcagtcagcatatggccggcgtctgccaacagagccagtgaaccagatagccagccacctatcgcttccgcaaccataaatacggtcgtcacgataaaggcgataagtaggcgcttactgttactgtttttcggggagtttggagttgttgtcatcattcatcctggattttgacaaagcaatttacgacaaaacctagctgatactttgggttatcaaaaccatctgctgatggtttgctaagtgagtattgaagatatcttattcaacttatcaattgtttcatctagtatcttcaataactgagtataggtttcctcggtaatttttccttgctggcattgaataactacctgctgacacaattcagcctctggcgcgtgctgtaaaatcaggaagctgcctttagttctatgggcggctttctctatagtggaaagagaagcatctggctggctaagtagctgtttatcctggatgagggaatcgagcagcgtgctagtcagtttgtgcatcatctcactattttgatgcgccaatgattggagagttttctccagatcgctgaaatcggtcggtgcagcaagagtggtcgcttccacacgtaaaatattttcaatggcagccagagatatgggtttggtcagccagtgatcaatcgccacttttcccggcagaattcgggtgaattcttgcacatcggcagaacaaagaatgatttttgccggagcttgatcttgctgacgttcgatatagcggatgatttttgccagcgtaaaaccgtccggatgcggcatattgtaatcaataaacaataaatcaaagggttgctggcggtgggctttaaggaaatctcgaccattctcaaacaattctgacgacatacctaagtggtttagctgttgctgcataagcagtaaattggttggatggtcgtccacaaccgcgattcttaacggttgtagcgccgtcaatggcacctgcgattgctgtgacggcaggctaaccgccggttcttcctctgttagggtggcgggcaggctgatgtctacctgcgtaccctgaccgtataccgaggtcaagttaatctcgcctcccatacgttcaatgatttctttgcaaatggataaacctaaaccgctgccttgtaccgacaagcttttgctatttccagcgcgataaaatggctggaacaggtgaggcaggtctttggcggcgataccgcagccgctgtctttaacctgcaataatagtttgccgtgggtatctgtttgaggctgccactgaatattgacgttaatttctccgctttgggtgaatttaatcgcattggtaatcagattattgatcacctgaagcagtcggcctccatccaccaaaatcgcccccggtaaggactcactctggctgacagcgaagctaattgggcgcattcccaaaagcggttgataaacggcgcggatatgcccgatccacggttccagtggcgtcggtttaggattcagttgcaggctgccggtttcgagcttggcgtaatcctgtaagtcattgagcaagctcaataaggatgaggccgaactgtatatcaccggtaagttatccttctgatgattagcctgctttaactccagctccagcaaccccagaatagcgtgcatcggcgtgcgtaattcgtggctaatcatcgccagaaaacgacttttcttactattggcggcctctgcctcgcggcgcgcctgttccaaccaattccgctcccgttgctcttttcgctgctgaatgaaacgtcgtagcaatacaaagagtaacccggcaataatcagccccagtaaggttagcaaccaaccggtttgcggtatcatgcgattatcattcaccgcatctatcaaactgctgcgatccgaggtccagccttcgcgcagcgattgcagagtggctggcggaatttgcagcagatttttattgagaatagacagcaatagtggcgtgtcacggcgcacgccaaacgcaatgggataagcgatgttgttagcggcaaaggccagttttatcgcgccggcatagcgagataggacaataaagttggcggaaattacgttatcaatcaatgcatcgacctgaccattcgccagagcattgtaaagggctttactgttctcaaaactgactacgctaaaaccgtcgggaatcaggtgttgccccagatttccattcactacgccaatactcttcccctctaaatccttccaggtagaaatattgttagcgtattcgcttacataaacgccccacaaagcccgatgaatgggagtggtgctgtcgtattgttctttaaaaccccgggttaatggcaatacggctcggaataatgcctgtttatcgctgacctgctggtctgcctgttgcgggttgctgctccagaccggagcgaattccagcccggtattttgagctatgatattaataatatcaacgatataaccatgaggctcgtcgtcagaacctcgatagctgaaagggtagtcattttcgattgcggcatagtaaatccgcggatttttcttcacccattcctgttccaactgcgaaaggtcggcgttgccggtatccagatagctgggaatttttttgctccagcgattctgaataacattggccatcgacatgggcaaattgctgataacctgatcgagcatctcaattaacggtttatcggtagaggcaaaaacaaaggataaattgcctaatttaatcgcgctttcaacctgatagatctgcccgagctgtagctgatcgataataaaactggcgctggtttcatcggcaataaagtaatcattggtgccatttaataatgagtaaaccgcctgtaaattactgtcgaataagcgtacgttggccgtctggctatttatttcgtcataagcctgcataccggtaattttgctgatggcaattcgggcattttccgagttcagcataatggaacggttattttgccggttgcgcagtacgcgtaaattactgacgtaataaggggcagaagagaacaggttaggcgtaaaggcattttgcggtatgccaaatagcaggtcgatctgtttgtttttaattgccagattgagctgcgccagatcggtaaagccgtaaatggcaatatgggcaccggtggcttgatgaatatagtttagatagtcggcgttcaggccatagagatcgtcatcaacgataatattgtaggggctgaggttatcgctcaaaatccccacacgcagggttttgccgtgccagtcattcttcagcgtagcaaaggtctgatcggtggggacgttgatgctactaaccagattatagcgtaccggttcggcggcaatcgctcccgtaggcaggcagaactgaataagggtcaggagcaaccaaatgaatttcatggctgtagatcgttaaatacggcaattaattcaagaagattcgccgccccagttttattcaaaatattctttttatgcgtactgacggttttattactgatgtttaacatttgcgcaatatgcaaattggagttccctttcgctaataggcccaatatctggatttcttttggcgtgagattatgtttttcataattatctgccgaggtaacaaaagaaatttcttccgggaaagcggtattacctgcgagtacctggcctatggcatctaacaggtgagtcatctggctacctttgtgcacaaatccttgagcaccggcgctgtgagccattttagcgtatacctctgtctcttgcgaggtatagacgatcaccggaagctcggggtaatggcgtcgaattctgcgcaggaattgcaggccgtctacttgcggtaagccgatgtcgaggatcagcaattcaaaaggctgttcggctagacgctggactgcctgctggtcgtcggagacactttgcaattgataaggaatggccgattgaagcagcgcggcttcaagggcgacgtgtacaacgggatggtcatcaactaagagcagccttggcatagtgtccttttatcctctgatatatatatcatcccaaataataactttgctaaattcattatgagtgagataagtacagacgaatagggaaatatttataattgttaataaaataactaattaaaataagtatatttcctatagatagcaaacaaataagtatcaatgtttctgatcggtagatacaggttatttttagccgcatatgcgcctggcggagggctggatttagggactgaacctaagtggtatacctaaagcgataaagtagatttacagcgttccattgacaggctagattggttgaaacctcaaatatgcaatgattgtcataagactgaatggaagagctatgaattaccagaatgatgatttacggattaatgaaattaaggaactcctgccccctgttgcgctgttagaaaagttcccagccagcactcgcgcggcagaaaccgtcgctcaggcccgcaatgcgattcatcacattctgcgtggtgcggacgatcgtctgctggtggttatcggcccttgttcaattcatgacactgaagcagcaaaagaatatgctgcgcgcttgctgaaactgcgggaagaactgagcggtgagttggaagtggttatgcgcgtgtattttgaaaaaccgcgtaccaccgtgggctggaaaggcctgattaacgatccgcacatggataacagctacgatatcaatgaaggcctgcgtctggcgcgtaaactgctgttggatatcaatgacagtggattaccagctgccggtgagtttctggatatgattacgccgcagtatctggctgatttgatgagctggggcgctataggcgcgcgaactaccgaatctcaggtgcatcgcgagctggcttctggcctgtcttgtccggttggtttcaaaaatggcaccgatggcaccattaaagtggcgattgatgcgatcaatgccgcgggtgcacctcactgcttcctgtctgtgacgaaatggggccactccgcaatcgttaacactgccggtaacagcgattgccatatcatcctgcgcggtggtaaagagccaaattacagcgctgcgcacgtgagtgcggtgaaagaagggctgaataaggccaatctggcagcgcaaatcatgattgattttagccatgccaacagcagcaaacaattcaagaaacaaatggaagttggcaccgacgtatgtcgtcaggtagctgagggcgaaaaagcgattatgggcgtgatgatcgaaagccatttggtggaaggtaatcagagtctggaaagcggtgagccgctggtctatggcaaaagtatcaccgatgcctgtattggttgggaagatactgaagttctgctaaaacagttggcaaacgcggtgaaagcccgtcgcgactaacaaattgacgtagaaatagtgggtatcagtgagtaccgagaataaaaaccccgccggagcggggttttttatggatgaaattcatccggcgaattacttcgctttaccttggttagccacggcagctgctttcgctgcgatttcgtcggcattgcccagatagtaacgtttgattggcttcagattttcgtcaaattcataaaccaacggcacgccagttgggatattcagctcaagaatttcatcttcgctcaaatcgtccagatatttaaccagcgcacgtagagagttaccgtgagcagcaacaataacgcgctcaccgctagcgatgcgcggtttgatttcttcgttccaataaggaataacgcgttcgatggtcagtgccagactctcggtcgttggcagctctttgtcagacagttttgcgtaacgcggatcgtgtcctgggaaacgttcgtcttctttgctcaactctggcggagtgatggcaaagccacgacgccattgtttaacctgctcgtcaccgtattttgcagcggtttcagctttgttcaggccttgcagcgcgccgtaatgacgttcattcagtttccaggatttttcggtaggcaaccaagcctggtccagttcatccagaatgctccacagggtgtggatagcgcgtttcagtacggaggtgtaagcgaagtcaaacgtgaagccttcgtcttttaacagcttacctgccgcttttgcttcggtacggcctttttctgacagatcaacgtcataccagccagtgaagcggttttcgttgttccactgactttcgccgtgacgtaccagaaccagctttgttactgccatagttcgaactcctcagatgtctaacttattcaatgataactattatcattatattgcgggattactgcgaacagcaatcgattgtgtttaaccatagccaattttttgccgcaaagtaagactctttgccgaatcgattcgtctataagtctatgcagcgaacaaacggggtactaaacataccccgcagcgccacatctagcaatgaaactggattacgcagcttttttcaggcaggtgctcatgaaggttttgcgactatcgcctttcagatctttggttttggcttcggcgttacaggatttcattttttcctgctgcggtgtcattgccgccggtgccactggtgcaccggctttcaggcaggtgctcatgaatttcttacggtcgtcacctttcagcgccttgctggtggcttcgtggttacagtcagtcatttttttctgctgtgccagttgagccggagaaggcgtttttgccgtatcggcagccattacgtttgcgctgagcaaaagccccgcggataacaaccacaatgtagtcaggcgcataacatttccttttggttcagtaagcagaatgaatatcgatccgtcgcgagccattaacacaggctgatttcacgatgagagatagctacctcaaatcatggagttgcctgttattggctttacggatgactctaagcgtagtcggcgtcgttgaggaagggtaggaacgggcgaaaaatcagttatatcttatgccagaaggcggggtggaaggaaagaaaactctccgtaaacaatatgttacggagaatgtgtggtcgtgaatactttattttaaaggtattacagcgccgtaaattgataaaccgtggtcgcgcggtagcgtttgtccggagtgacccaacagtcgggctgtggccattccggatgattagggctatcgggtaaaaatccactttccagcgctatacctgcataattagcgtaagttccgccgagtcgagccggtgttccattcaggaaattaccgctatacagctgtattgccggtgcggaggtaaatacgctcattttgactttgccatcggctgaccatacatgagccgcagggctgtcgattgcgccgcaggttcggtggagcaaataggcgtgatcgtagcctttaacccgttgttggcagggatctttgaggaaatcctgtgctagcgtttttggctggcgaaaatccataccgctgtgttctacgctggctaaaggttccgccggaaggcctgtagtgtccaccggcaggtaacgatcggcgaaaagttgcagccgatgttgtcgtgcgtcgcgacttttaccatccagattgaaataggcgtggttggtcagattaattgggcaaggctggtcgaccgaggcctgataatcaatttccagccgattgtcatcggttaaccgatagtgagtttcgacgatcaaattgccaggaaaaccctgatcgccatcaggggaatgcaattgataacaaacctgacgtttatcctgatgaataatctgccagcgccgggcgtggaacccttccggcccgccgtgtaactggtttggaccactgttggcgaccagaggaaaaacctgtccgttacgctgcaattgagcctgagcaatgcggttggcgtagcggcccacggtggcacccaaataggcaccttgccgcgggtaatcttccggattcgggcagcctagcagcaattcacgtcggcccccatcgttaagcggaaaaacagccgaaagccaggttgcgccccagtccatcaggctcaccgacatgcctgatttgttgcgtaattcggttaactggaacggctggccgtccggcgctaatgcatttttcagcatattccggctcctgccgaagcctgacaaacatagaatgtttcccgcataccgccggttttttgcggatattccagagcgacggtcgcacgtacttgctcgactaaatcctgaggcatcagcgcgacaatgcagccgccgaagccgcctccggtcatacggacaccacctcgctcaccaatgacagatttcacaatatcgaccaacgtatcaatggctggcacggtaatttcgaaatcatcacgcatggagatatgagactcctgcattagctggcccattaatgtcagatcgccaagagccagagcatcggcggcagcctgcgtgcgcgcattctcactaataatatggcgtgcgcgtttggcaactatcggttccatttcgctctgattggcccggaactgtgccggagtgacgtcgcgcagggcttttacaccaaagaagcgagcggcagcttcgcattgttggcgacgagtgttgtactcgctatcgaccagaccccgctttacattggaattgattatgactacggcgacgttttttggcatagcaaccgggcgggtttccagcgagcggcagtcgatcagcaacgcctgatcctgcttgcccaatgccgagattaattgatccataatgccgcagttacaaccgacaaactggttttctgcttcctgaccgttgagcgccagttccacgccgctgagcgggagctgatagagtgcctggaatgcctgacctaccgcgacttccaacgatgcagaggaacttaaaccggcaccttgaggcacattgccgctgatcgccagatcggcaccgccaaaatcacggtttcgcagcaacagatgtttcaccacgccgcgcacgtagttggcccagcgcagttcagggtggctaacgataggttcatcgagagaaaatatatcttgctggttatcataatctgcggcaatcacacgaatctgtcgatcatcacgtttcgccatgctaataaccgtggcgtaatcgatcgcgcagggcagcacgaatccgtcattgtaatccgtgtgttcgccaatcaagttgacccgaccgggtgcctgaatggtcagggcgggttctttggtaaaaaattggctaaaaacggcctgggtatgttgttttaaagacattattgaactccagcttctcgataatgaacatcactgactgcccgcaggtgctcagccgcctgttcagccgtaagatcgcgctggctttccgccaacatttcgtaacccaccataaattttcgcaccgtagctgaacgcagcagcggcggataaaaatgtgcatgtaattgccagtggcgattgtctgtatcgttgtagggcgccccgtgccaacccatggaatagggaaaggagcaggagaataaattatcgtagcggctggtcagttttttcagcgccagtgccaagtcggtctgctgttccgaggtgagctcatcgatccgcatgacctgggctttaggtagcagtaaagtttcataaggccaggcggcccaataaggcacgacggccagccagtgctcggtttctaccacggttcggctgccgtcggcggcttcccgacggacgtaatccagtaacagtggcgatgaatgctgttcaaaatagtttttttgcagccgatcttctcgttcggcctcgttgggcaggaaactgttggcccagatttgaccatgggggtgcgggttagagcagcccatcgccgcgcctttattctcaaaaacctggacccacggataggattggcctaattccgcgctttgctcctgccagcttttcaccacgccggccagttcaggcagagaaagtaacggcagggatttactgtgatcgggggagaaacaaaccacccgactggtaccgcgcgcgctttggcagcgaatcagaggatcggcggtttccggcgcatcgggtgtatccggcatcaatgcggcgaaatcattggtaaatacataagtgccggaataattcgggttcgcatcaccggtcacccgtaaattacccggacacaaaaaacaatcaggatcgtgagcgggctgttctcccgtggtcaatggttcttgctgcccttgccacgggcgcttggcccgatggggagaaacgagaatccattgatcgctcaatggattatagcgacggtgtggatgatccacgggattaaagccagtcatttttcttccttaatcaggataaccttgaggattttgtgattgccagcgccaggtatcgatagccatttcgtccagtgagcgctgtacgcgccaatccagatcctcggcagctttggttgggtctgcccaataagcggcaaggtcgccttcgcgacgtggagcaaaatggtacgtcagctgtctaccgcaggctttgctgaaggcattcaccacgtccagcacgctgtggccgcgaccgccaccgaggttataaatatgtactccagctcggttgtggcattttttcagtgctgcaacgtgaccatcggctaaatctacaacgtgaatataatctcgcacagcggtgccatcggcggtgggatagtcattgccgaaaacggccagagaatcgcgtcggccgacggcgacctgcgcaataaacggcattagattattgggtacaccctgcggatcttcgcccatcagcccggacggatgggcgccaaccggattgaaatagcgcaaaatagtcatgttccatgcggcatcggcacgctggaggtcttgcagaatattttcgaccatcagtttgcttttgccgtagggactagagggaatgcccgtggggaagctttcgacataagggatcttgggttgatcgccgtaaaccgtggcggaggagctgaaaataaagtttttaaccccggctgcagccatagcttccagcaataccagcgtgccgcagacgttattatcgtagtaggccaagggtttatttaccgattcgccgacggcttttaaaccggcaaagtgaatcactgaaccgatagtatgctggctaaagatatgatccagtagtgcgcggtcgcgaaggtcaccctgataaaacagtggcgattgccccgttaattgatggatgcgttttaatacgctggatttgctgttgcataggttgtcgataacgattggcgtatagcccgcttcaattagctgcacacaagtgtggctgcctatgtaaccgctaccacctgtcactaaaacatacatacaaagctcctgaatcgtacttatgagatgaagataccacgccaataacggtaaaaaagtgatctaacatcaaaaatggaatcgtttacactcatattcaataaggcattgaacagcaggcatacagtcagtctgaagggcataagaggggaggaataagtgtagcattatggtaacgctttcatccacctaaccgacaggaatgtcctgccggttgatgaattcagtgtggcagatctgcctagtgatgcagtgccaacgggtaggtaaagaacagcagatgagtcagattcagcgcgaaatggaaggcaacggcgatccacaggcggccactccacatccatgccagaccgtaaatcacgccggctagcgctgcgaagaccatcaacagggggcctccgggataatgcgctgcaccaaatagtaatgaagcaataatcagagcgggaaatgcaccaagccactggcttaaacgctgttgcaggtagcagcggaacagcgcttcttcaaccagacagacaaagaacaggttgccgataacaaaagtaccgagccattctggcgtgtgcagttcgattttcaggccgcctaaacccactgccagcagcaacagtgctggaacagccagcaccaatacagcccaaccgactttccctacggaaggatgttttttagcaacaaataagcccggcaagcagcttaacagaacaaagggaatcagagctttgtccagattgtaatacattgagaacggggcgctgagtggcccgatctgcactttatccagtactttcagattgttgaaacccggaatgtaatggaagaacagcgccacagaagccgctaccaatagcaactctaatccgccagccagccaggttatctggcggtatttttgcaatgctaacgaggcgagcagaattaacaacagtgcggtgatggccggtaaggtcagtacgccggtcgcagtggcaatacctaaagtaatagccaaaagtaacagggcgatgatccggttaaatggcaaaaagagtaacgaagcagcaagaacgccccacatagactagtccctttatgtgttgaatttagtgatagattcagcgccgatagccctggcactgaatgtaaatccgatcgatgtctatcgatcggcataaataataacataatgaaatggattaaaaggtcgggtcagttgtcgacaagccgatttgccagtccgaactgcgccaattgcccttaaggtaacgctctaatcaggtagttggctaaactggtagcgataaatatcgccgtcggcaataaaacttaaacgatgagttatgcactctggcgcgtcttcagcgtgatgagagacaaataacagctgggtttctccttcgccaatcatgacatcaataaaacgccgcactaacaaacggttcagcggatccagcccttgcaacggttcatctaatatcaacagtgccggatgttttaccaaagatctggcaatcagcgccagccgttgctgtccccatgacagactgtgaaacggctggtcagctgccgcgccggacaaaccgagcaacgccaaccatttatctgccaactgccgctgtcgatcggaaactgtctgataaataccaatggaatcaaagaaaccggaaataatcacattacgcaggctggcgctgacgcgataatccaaatgcaggctgctgctgacataaccgatatggcgtttgatatcccagatggtttccccgctgccgcgacgacgaccaaatagcgtcagatcattactgtagccctgcggatggtcgccggtaatcaggctcagtagcgtggattttcccgctccgtttgggccaataatctgccagtgctcgccgcgatttacctgccagctcagattgtgcaaaatgggacggtcgttgtactccaccacgccatttcgcagaataattaacggattatctactgctaatgaaggttgttgctgcgggtcttctgcttccggcagggatagtccatccaagttttcactgtgagccagttgggcgactagggcttcggctaaaacctgcttacgttcacctaaactgactaaatggcaatcggccaatactcccactttttgaataaaatcaggaatatcatcgaatcggttgagcactaatatcagcgtcacgccttcagcggacagttccgccagatgtcgcgccagctgttctctagcggcgacatccaatccgtcaaaaggctcatccagcactaacatatcaggctgcggcatcagagcctgacagagcagggctttgcgggtttctccggtagaaaggtatttaaagcggcgagataacaaatgaccgataccaaactgctgcgctaaccgctggcagcgctgcgggttggtgacctgatcctgaataatttccgcggtggtacggccggtatcgtcttcatcctgactgagcatatcggtattgttgcgttgccattcttcgctgactaactgctgaagttgctcgaacgataaacgcacaatatgccgaaaatcgctgctgcgactgccggtcaggagaattaactcatcggagagcgctctggctaacgctgatttaccgctgccgttagcgccgacaaaggcccagctatcaccagagtgaatatgcagatctggaagattcagcgttcggatatcgcttaaacgaaaacaaccttgcgctatatgcaactctgacatcattcctcccattttccgcaacgtatttacgttaagggataagcggattagtggggaaagtcaaatgacaaatctgcacgactgcgccggtaacgcagcgtacagataaggaaactgtgctaacaaagcgtggcgataatgactcgatcggcgttgaactgggcgataacttgcgcgccattatgtagattcagtttatgtaactcttgattggataaggtggcgcacaaactggctccgccgtgaagggtaacaatcacttcactgtagtcgcttcctggctctatgctggcgacgatgccgggcaatgagttgtctgctgctcctgccagcgctggatcggtggctaatttcacccaaggggccttaatcagcgccagcacctctttgcctgttgccagttgcaggcgatcggcgctttgttgagtgacagcggcggaaagacgagtttttccatctgccaggagaatattgatgtgttgctgaacctgatgatgatcccgctcagtgaccgtgccaaagaactgattgcgggcgctggtttgtaaggagaagcgggagattgctgctagcaggctgtccagcggcagtgaatcatctttcaaggtatcgaaagctttttgctgaatttgctcgagtaattcgtaaagttgaatcaagcgttcgccatagcgggttaaacgcgcgccgccaccgcctttccctccggttgcgcgatccaccagcgtttcttcggccagagtattcatttcattgatggcatcccaggcacttttatagctaatgcccgccagcttggctccttgactgatggaacctgtcaacctgacctgcttgagtagggcgatgcggcgcgggtcagcaaaaagacgctgctgaagctttagcgtaagaagaatttcggcttgcatggtcattttggctccggcagtaaaagcgccattgtgaccgattggcgtgcgggggcgcaaatcgcacttttggctggttacatttttttgtcagttgctaaaataatagggcttattcacttcaaatatggtttaaagtgaattattgaaagtggtgtagtataccgctcaacgagcagttaaatgaggctaccatcgtggaattattgaaaagtttggtctttgccgtggttatggtaccggtggtaatggccgttatcctggggctgatttatggtttaggtgaggtgtttaacgtcatctccaaaacaggccacggtaaagaacggggctaatgacatgctccttctgcgttgagtttttcttcgcagcgacctgaaattcaagaatgcccggttgatttccccaattggtttagctgttgcacaagttgcggccgttaaacgaaagggtttcaaccgggcgttttcgtttctgttatcccacgttatttctgccattatttctgtcctatcgctaacaactcaagatctgtcacagcttgccgataaactgcatgaccctgttatttgcttacgttatattgttcattacataacgatatattcactcggagcagaaaatgaaaaaacaatggggtaaatgggcactaggcgcggttgtggctgcaactttatctgggcaagccgcggcggctgaaaatatcaccgtcttcgctgccgcttctctgaccaatgcgctacaggacatttccagtcagtatcataaagagaaagatgtcgacgtggtggcttcttatgcctcttcatctacgttggcccgccagattgagcagggcgcgcccgccgatctgtttatctctgccgatcagcagtggatggattatgccattgataaaaagcaaattgttgataatacccgctacactttgctcggtaataaattggtgctgattgcgccaaaagacagcaaaattgataaagtctccatcgataaacaaaccgaatggaaaaaactgttagacggcggtcgtctggccgtgggcgatccggatcatgtacccgctgggatttatgcaaaagaagcattggaatatttaggtgcctggacaactctctctccggaaatggctcgtgctaacaacgtgcgtagcgcgatggcactggttgagcgcgcagaagcgcctttgggtattgtttacggctctgacgccatagccagtaacaaagtgaaagttgtgggtgtattcccggagcaaagtcataagccggttgaatacccaatggcaattgtcaaaggccatgagaacgccacggttagcgctttttatgattatctgaaaggcccagaagcggcggctgttttcaaacgttatggatttaccccacgctaatgatattgagtgagtatgaatggcaggcgatagtgcttagcctgaaagtttcgggcgtcgcggtcgcctgtagtctgccgttaggcattctgatggcatggattctagtccgctgccgtttccccggtaaatcattgttagacagtattattcatttgccactggtgctgccgccggtggtcattggctatttattgctgatcagtatggggcgacgcggtgtaataggcgaatggctatatagctggtttgggattaatttcagctttagctggcgcggagcggcactggcctcggcggtggttgccttcccgctgatggtgcgagccattcggctggcgttggaagcggtggatacccgattggagctggccgcccgtacgttaggtgccaatccgtggcgggtgtttttcactataactctgccactttccctacccggtgtgattgccggtacggtgctggcatttgctcgttcactgggggaattcggcgccactatcacctttgtatccaatattccagggcaaacccgaactatcccgctggccatgtataccttgatcgaaacaccgggtgccgaagcggctgcggcgcggctgtgcgtgatcgctattttgctgtcgctggtttcgctgttgctctccgaatggttagcgcgttggggtaaaaaacgcatgggggccgcatgttagtactggattttagccagcaactgggcgacctgaatctgcaggtcaacgccgaactgcctgcgcagggcattacggccatttttgggctgtccggcgcggggaaaacctcgctgattaacgtggtgggtgggttaagcaagccgcagcaaggccgggttgtgctgaacggtcgggtgttggtggatgcggaaaaacagatctatttaccaccagagaaacgtaaagtcggttatgtgtttcaggatgcacgcctattcccgcattatcgggtacgcggtaatttgcaatacggcatggcggcatcgatgcgttcccagttcgacaccatcgtgaatctattgggaatcgcgccgttattatcccgctttcccatgacgttatccggcggtgaaaaacagcgggtagcgattggccgcgctttgctgactgcgccggagttgctgttgatggatgagcctttagcctcgctggatttaccgcgcaagcgcgagttactgccttatctggagcgtttggctcatgacgtcaatattcccattctgtacgtcagccatagcatggatgagattttgcggctggcggatcgggtggtggtcatggatgcaggaaaagtgcgcgcagtcggcggtttagaggaagtctgggccagtagcgctttgcgcccttggctacagcgagaagaaccgagcagcattctgcgagtggcggtgattggccatcatgaacgttacgctatgaccgcgctggcgttgggcgatcagcgtttgtgggtaggtcatgtggacgccgagctggacagtatgctgcggattaaaatcaacgctgccgatgtgtctttggtgttacaaccgtcgcataacagcagtattcgcaatattattccggcgaaagtggcggaatgtctggacgtagacggtcaggttgacgtgaagctagcgatcggggaacagtggctatgggcgcgaattactccgtgggcgcgcgatgaactggcgctaaaaccgggtcaatgggtgtacgctcagatcaaaagcgtttcgtttaaccgcaaaggggaatgacgggaagtttgttgcccgcgcgcgattttcctcaggtctttatcagcgaaaaggctccataagtggagccttttgatgaatcaattctggatttccgaactcatcacgctaatacatgctgacgaatggcggcggcgatacccggctgctcgttatccgcgatcaccagatcggcacgctgtttaatggcatcggcgctgttacccattgccacgcccaaaccggcggcttccagcatactcaaatcgttaaagttatcgccgaaggcaatgacttccttcatgctcattccttgagattcaacccactgctgcagacgcttgcctttactattgcctgcctgtgcaacatccacctgatcgtgccacgaccattcgcaagccagacccaattcgtcttccaccatagtggcgaaggcttgcagtttgttggtatcggcgtgggatgtggcgaatttccagatggaactggcgctgcgagccgcgtcgtgcaggctattcacatgtacgatcgccggacgctgatgttcaggtaaatttccggcccagttaatcgagcggctaacgtggccgttaagatgttgatacagcatggcgtcatccacgtacatcaggccatgaatctcggcgtgatccagtagctgaattacctgaaccgcctgttgagctgatagcggatcggaagctaatacctgcttcgcctgataatcgtagagataggttccgttgcagcaaatggctggcgtatctagcgctaaagcctgataaaacgggtgaatcgccacgtgatgacggccggtcaccaccaccactttcactccggcggcgcgggcttcagccaatgctgacagcgattctggcaggatacgtttctggtgatctaatagggtgccgtccaaatccagagcaattacgcgataggtcatagcggtctcatcatttattcgattattaatacacattgaaccgatgttacaccggataggtgagggattaaactgaacagattgattccctgaccattatggcgagagcgcgcgcaggtgccgcagcagggcaggtaagccgtggtattggcagacaatcgttagttggcctgagtgattattctgctaaaacgagagctattttgcccaaaacgttgttctgctgctgaaagttgttatgccagcccagtcaggtaagctaggattcagttagccgcgtcacggcaataatttgactagcatgcatgattaaggagtagcgatgaatcaagtggtttatgtggcaagcccagacagccagcagatccacgtctggcaattggatacggcaggggctttaacgctgctgcaaaccgttgacgtaccggggcaggtacagccaatggcgataagccccgaccagcgccatttgtacgtgggtgtgcggcctgattttggcattgtcacttatcgcattgctgctgatggtcaattgcaggaagtgagtatggcaccgttacccggtagcccgacgcatattttaaccgacttacaaggtcgttttctgttctcggcgtcctacagtttcaactgcgttagcgtcagccctattgatgaacacggccatgtgcaagcaccgattcaacaaatcgatggcttgaccgcgccgcattcagccaatatcgatcctactaaccaaattctgttagtcccttgcctgaaagaagaccgcatccgtctgttcgatctgagcttaaacggtaaattgaccccacacgatcaggtgggcgtttccactgcagcgggcgctggcccacgtcatatggcattccaccctaaccataaagtggcttactgtgtaaatgagctaaacggtacggttgatgtgttccagatcgaagataacggtcagcaataccgaatagttcagacgctggatgcgatgccagccgattttgctgagactcgctgggcggcagatattcatatcacgccggatggccgttatttatatatcagcgaccgcaccgccagcctgctgggtattttcagcgtttctgaaagtggcaacgtgatttctctggtaggtcatcatctgacggaagcgcagcctcgcggctttaatatcgataatagtggccagttcctgattgcgtccggtcaaaaatccgatcatatcgaagtgtatcggattgacccggcaacgggtcagttgacgacgcaggggcgctatccggtgggtaaaggtccgatgtgggtgagtattctggctcctaaacatggataatccatttttagatttcagtctgttatcagtgagataacgggttgaggaacaaataataaagcagcgctctgtaaaccggtcgctgcttttttaatgccaataaaccggcttattctgcgacggccgcggtaatcgcctgggtcagacgggtgagctgttccggctgaataatatacggcggcatcaggtaaatcagtttgccaaagggccgaatccatacgccccgttcgacaaagccgcgctgcaaagatgccacatttaccgcgttttccatttcgaccacgcctatcgctcctagcactcgtacatcggcaacgccaggcatcgcggccagcggcactaattcacgctgtaattgtgtttcgatgctttgcacctgctgttgccagtggttgcccgccaacaaagccagattcgccaccgccacggcgcaggccagcggattacccataaaggttggcccatgcataaagcaaccggcatcaccattactgatggtttcagcgacttgacgggtggttaacgtagcggaaagcgtcatatagccaccggtgagggctttgccgagacaaagaatatccggcacgatttccgcgtgttcgcaggcaaagagcttgccggtgcgcccaaagccggtggcgatttcgtcagcaatcagcagaatattgtatcgatcgcacaacgctctaacttcacgcaaataagctggatgataaatccgcattccgccggcgccctgcacgatgggttcgagaataacggcggcaatttcgccgtgatgctgctcgattttttcggcaaaatcgtgaatatcgtctggattccactcttcatcaaaacggcactgcggtgcgtcggcaaacagatgattagccagataaccctcatataggctatgcattgagttttgcggatcgcacactgacatcgcgccaaaagtatcgccgtgataactgtggcgcagcgtcaaaatgcgctgacgcttctctcctttggcctgccaatattgcaacgccatcttcaaggccacttctactgccaccgagcctgaatcggctaaaaatacgcattccagcgtattgggagtcatggcgaccaattgtctgcacagcgcaacggccgccggatgagtaatgccgccgaacatcacatgagacattttccccagttgctcagtaaccgcctgatttaacacgggatggttataaccctgtatggcagcccaccacgacgacatgccatcaataagcagtcggccatcggatagttgtagctcgacgccgctggcagaaactaccggataacacggcagcggctgagtcattgaggtgtaaggatgccagatgtggcgctggtcaaaggcaaggtcagaaggtgtcataaggatctgttgtaaactaaattaaccatggaatggttgacagtatatcgagtttacataaactgacgagacttttctcattctttggagatgccaatatggcagatcgcattcactggacagtagggcaagcccaggccctgtttgataaaccgctgttagagttattgtttgaagctcaacaaattcatcgtcagcattttgatccgcgtcagattcaggtcagcactttgttgtcgattaaaaccggtgcctgtccggaggactgtaaatattgcccgcaaagctcccgttataaaaccggtttggaaagtgagcgtttaatgcaggttgagcaagtgctggaatcggcaaagaaagccaaagccgccggttcaacgcgcttttgtatgggggccgcgtggaaaaatccccatgagagggacatgccgtatctcgagcaaatggtgcagggcgtgaaggcgatgggaatggaaacctgtatgaccttgggaacgctggataaaagtcaggcgcaccgtctggcggatgcggggctggattactacaaccacaatctggatacctcgccggagttttacggcagcatcatcactacccgtagctatcaagaacgtttggatacgctgggggaagtgcgtgacgcggggattaaagtctgttccggcggcattgtcggtctgggtgaaagcattaaagatcgagccggattattggtgcagttggcaaacttgcctaagccgccggaaagcgtgccgatcaatatgctggtgaaagtcaaaggcacgccgatggaaaataacgaagacgtggatgcttttgattttattcgcactattgccgttgcacgtatcatgatgccgtcctcttacgtgcgcctgtccgcaggtcgtgaacaaatgagcgagcaaacccaggcgatgtgctttatggccggagccaactcgattttctacggttgcaagctgttaactacgccaaatccggatgaagacaaagacttacagctattccgcaagctgggcttgaatccgcagcaaacgtctactgagcacggcgatcgtcagcaacagcaggtgctgactgaccgcatcaaatacagcgatacgccacagttttataatgcggcggtctgatgagttggcagcataagatcgatcaaagcttgcagcagcggttagcgcaggccgcctaccggcgccgtcaggtgaatcagggttccactgggcgctttctgcgggtggaaaatcgccaatatttgaatttttccgggaatgattatctgggattaagtcaggatgcgacggtgattgccgcttggcagcagggcgccgctcgctatggcgtcggcagtggcggttccgggcatgtcacgggctacacgcaggcgcacgccgatctggaacaacaacttgccgattggctggggtgtcctcgcgcgttgttatttatttccggttatgccgccaatcaggcgctgctagcggctttaaccgccgcagatgatcgggtattggccgatcgccttagccacgcttccttactggaagcggcggcgagttcaccggctcagcttcgccgctttcagcataatcagccagaatccctgcaaaatctgctgaataaaccttgctccggccaaacgttggtggtgaccgaaggggtatttagtatggatggcgacagtgcaccgctggcggatttgcaccaacgcgcgtcggcggcgggagcctggctattggtagatgacgcccacggcattggtgtcagaggtgatgaaggacgcggcagttgctggcagcaaggggtaaaacctgagttgcaggtcgtgacttttggtaaagcttttgggctgagcggtgccgctgtgttgtgttcgcagccggtcgccgagtatttgctgcaatttgcccgccatctgatttacagcacttccatgccgcctgcgcaggcttatgccttgcagacggcgctaaaacgcattcaacatggtgatgatttacgccagcgtctacagcagaatctacggcagttccgtcagggcgcggccagcttgccattgcagttaactgcgtcagataccgccattcagccgttaattgtcggtgataatcagcaaaccctctctttggcgcagcgcttgcgggatgaagggctttgggtgaccgccattcgtccaccgaccgttcctcccggcggcgctcgtctgcgtattaccttgaccgccgctcatcagccggctgatatcgaaagattactggaggtgctacatgccacttgccattgatactgtgaataaacaggcgatagccagcgcctttagccgtgcggcaggtagctacgatggtgcggccgctttacagcgcgaaaccggtgaaattctgctggcattgggtcaacggcacccgggtactcaggtgctggacgcgggctgtggcaccggttatttcagccgtcgttggcgggatctgggcaaaaaagtggccgcattagacctggctcccggcatgctggagtttgccagacagcagcaggccgccgatgaatacttgttaggcgacattgaacatattcctttgtcgaatgagtcggtggatatttgtttcagcaatctggcggtgcaatggtgcggcaatttgcgcgccgcgctaaacgagctgtatcgggtcactcagcccggcggcataattttattttcgactttggccgcgagttctcttgatgaattagggcaagcctggcagcaggttgatggccagcgccatgtgaacgaatttctgccgttggatgatataacggccgcctgcggtggttttcgttatcaaataacgcaacgtattcatcatcagtatttcaacgatcttatcgagctaatgcgctccttgcagggaattggcgccacccatttgcatcaggggcgagctaatgggttgaccgggcgacgtcgactggcggcgctacaggcggcttatcctcagcaaaatggtatttatccgctgagttaccaattggtttatggagtgatttatcgtgattaaacgctggtttgtaaccggaactgatactgatgtagggaaaaccctggctagctgcgcactgttacaggccgccaatattcagggttatcgcaccgcgggttataagccggtggcttccggtagcgaaatgaccgctgaagggctacgcaacggcgatgccctcgctttgcaggccagtagtaaccaacctctcagttatcaacaggtgaatccactgacttttctggagccaacctcaccgcatattgtgagcgcggaagaagggcgtcctatcgatttttccgttttatccagaggcttgcgcgagctagaacagcaggctgattgggtgctggtggagggggccggcggctggtttactccattgtctgagcagcttactttcgccgattgggttatacaggagaaattaccggtcattttggtggttggcgtgaagctgggttgcatcaatcatgctttgcttaccgctcaggcgattgcgtttgccgggttgccgctggcaggctggatagcgaatgatgtcgtgcccgccgggaagcgacaggaagagtatatggccagcctgacgacgatgattgctgcgccgttgctgggtgtgattccacatttgcccgaagtggcgggacatccgttaggtgagtatctgaatattagtcggttaaacgattaagagcagatatgattcaggggcggcatatctgtaggttagtcagataattggctattttttcttaaataatcgcgagtatggtatcgttctttcaataattctgcgatcgtaaatagattctgaaaactaattcacaacatctatttatggtcgttatttgaaagaaaataaaactggttgtgataatgtaaatccacttaataaggctgattaacgctagattagttagtcctatgtcatcaatttatctttgtatcacccccagtgttattcaggtattggattgataattaatgccacttgggtttctggctcattattcataacgcagtttcagtggttaaaacaagaccgatcaatattcgattaatattaggaatgatattaagcattatttaaaaagccaatgcacgtcatctggtttatttctcatctgtttttaatttacaccagaggtaatggcatgacctttccagaactattaaaattactttctactggaacgaatctggatctcggtactgcggcaaaaagcggcggatgcacgattcaatttgataaaaacattgatgttacttttgagaatcacgataacaacctatatttattttctccggtaatgaatattacctcggtgttgtcggaagatttttttgcttcactattacaaattcaattatttggcattgcgacaaaccgctgctggtttggctatgatgcgggtggtcagcgggtgctgttattctgtttattcgatttaaataaagtgacgccagaagatgcaattgaacgtattgaggttttagtcgatcaggttcagtactggcagcagaatttaccgcagattgccaaattatctgacacccattcgggagcatatcgggttaatgacagctttcaacggccgaggtaaacatgaataatatttctttaccaagattcggtatgcagattttggcctacacggcgcttgatcgaagtcatttattaaacagtctggtgagccgtatttctggtagttcggataaacgtgacgagctggccaataaaataatttcaaacacggtaacccttgggcagaatgcgcttatttccaataagacgcttgggaagcgtagcgccgagattgtaaatcaagggcgaagcgtattctttggcaatacgctgcagcaggttgataaaggcgtcggcccgttggtcgagcttattttgcaatctaaaggtcaaggcggattggcgcaaaatatcgcttcaggtattgcccagtgtcttggcccggtcttattacaagatcatgcggtagaaagagttctggtggccttaaccgagcagaaagggggagaaaacgtcctcaaattggcattagagaataccttgtctggctatactggcggaaaaataatttcggccacgtttatgtcggcattaaaacgcgccatattggacaggccagaatataaaccaacgtcaccattacatcatatggcggcctggaaattacaccaatccttaacttctgatccggcatcactgccgccagccccgtttggtttacccaccatagaagccatcgcgggaactgtccctagtttggtcagcacggtttgtaagcaattagataatattcagaatttattgcagcttcctcttagcgaaaaagagctatcgagcgtattttcagaatgctggccaagtgatttggcggttacaaaggatatgacgagcaaaaatttcgccagtattgtcatgatggctcatgccacaaaacaagaaagtattctcgacgagaaaatcgcggaattgccggatggaatacgtcaatcattccagcagcaatgcaaagagataagaatatttttatccagaatacctgatgcgcaaatcaaacttgcccaaaattggtctggggggactgagagtatctcggtcaatcattctaaggagcactcaccgcctgcaaaattggtggattttatggataatcaatttcgcgcgccggttcatcatccagaagaagtggcttcctattttgccgatggcgctttcatcgacgcttttaaggccggtatcgatcttaaagtggataatcgccaccaaagttatggtcgttgggcgatgggaatggggaatcagttgttctcgcagctgcaaaatataattgggaacgatcgacaagaactgactcatgcacaaagggggcaactggggcaattatctgaaatggtagataataacccaatgagtttaatggccatgagccgttatctggtccctgaaagtattgtttcggccgttcaggatcaggttctcggccaatttactcgtcagggaccggatctgattcttgccgataatatctggatgaaagtaggtaagcctagcgtcagctttgcggtgagtaaaaataatggcgtggatattgatattaaactgacctggccgattagccagtttggtaaaaccgcacagacattagaagctgcgaaagatcatcaaagtcatatcagctcccaggtaaaagtacatatgcttttcaatgagaaaggcgttgagaagcaggatatgagcatctccgcgacccagatttcgcttagagatgaactcacgttaaccgccgcagaagatttgactgaaaataccccgatcgctttcctcaatcgaggggtattaaagcaggcgttcgaaacggcgtctaattgctaagtcacggtaattttttaaacttattacattagacgatactgtccgcacagcttcggaacaaacagatttcatcctcaacgcctgcggccattaaactgaataatgccgcaggtaatgtactcgctcgaacttcatatcaatgcttatctcgaataacagatttatcaaaccgttaagtattcggtgatcaaatcgtcatctaacagcgcaaattttccttgagccacatttcttccctcatcaatcaaataaaagcgatcggccacttgctgaatgttctccaaccggtgttcaaccagtaagaccgtcaggccaatattttggcataactggcgaatgacactgccaatttccgcatttagcgcgggctgatcaccgcaacccggttcatccagaatcagtaattccggttcgggaactaacgcgcgcgcgaatgccaacagttgctgttggttacgcgttagctccccgccgcgttgacggcgctgctgatgtaaaaacggaaagaaatcatagatccagtggggaataacccgatctttgtgacgcccagccagaagcgcgaccagcaaattatcctccacgctcagttgagagaagattggctgcccttgtgggacatagccaatccccagtgcggttcgtcgctctaccggctggtgaagcaggttttcaggcggttcccccccgggttgccaaaccatcgtgccgctttccactggaagatgacccattatgcaattgatcagcgtggtttttcctacgccattacgacctatcagacaggtacattggccgggaggtaactcaagattgatatcccatagaatatgggtgcgaccataaaattgattgaccgattgtaaacgtagcatcagaaaatctcctcgcttggctaggtgctgagggcgtaggctggctgagttctgcgagcaacttttgctgccgttaggccaatcctcagcataaaaatctcaagatatgaaaaaacgtgttggcataaagaagtgataaataaccagtttcagatattaacttgcggctaacggtgatttttactgctaaacagccgttttcagcactcagtctggcctattaacactggaacgcaactcccgctatcacgcttctgttacgccgaatcacagtgaaataagcaactctcgagccaggttgctaacgcataagaaaaaaccattatgttaggacgatgtaacgaaattatttggccacttgcgtaaaatttattggaaatggcataaaccgccggcagctacgggatggcggttgcacctaggcggtgccactctgagggggcgtggtgcaaaaaagaaacaatttgaatcggttgcgcggtggatgactcgtgtaggcggcgaatagcaaattagcaagggggatatttagcactaattgaaatatatagagaaataaaaatgtaaaaaaatgactaaaaaatcctatttggacctgtttttaccttaaccggcggttttctccagctcgcaccacagacgggattgagtgagttatccaccattcctgtggataaccttgtgtattagacacaaaaaactagtcgcaagcgagagaggacgcggcttatgccccggttgtctggattctcttctttttctaaatatacataaattacaataagttaattaaaatcaagacttgagtatttaacactggtggttatgtgtgatctttaatcaatttgttttacagaggttaacaactgcctctttctggggataaatggggtattgtcatgcaaatggcaatatggaatcgagataacggaggtgtcgtgccagaaccagcgctcttttccctatatttatacttgatgctggttttatatccagtatcatagcagtggaaaaaatctgggaggctcgcataattagcttcctaaccgcgcgtgattctccatcgggtagctaattcatgagtaaattattcaaactgcattctgagtttaagcctgctggcgatcagccggaggcgatccgtcaactggaagaaggtctggaaaatggcctggcgcaccaaacgctgctaggggttaccggctcgggtaagacttttaccgtggcgaatgtgatcgccgatctgaatcggccaaccatgattttggcacccaataagacgctggcggcacagctgtatggcgaaatgaaagaattttttcctgataatgcggtggaatatttcgtttcctactacgattattaccagccagaagcctacgtccccagttctgatacttttatcgagaaagatgcatcggtaaacgagcatatcgaacagatgcggctttcagccaccaaagccctgctggagcggcgtgatgtggtggtggtggcctcggtttctgctatctacggtttgggcgatccggatttgtatctgaaaatgatgctgcatctgaccaaaggaatgattatcgatcagcgggcgattttacgtcggctagcggagttgcaatatgcccgcaacgatcaggcgttccagcgcgggacttttcgggtgcgcggtgaagtgattgatattttccctgccgaatctgatgaattggcgctgagagtggagctatttgatgaggaagtggagcgattatcgctgtttgatcccctgacgggccagctgcatcaggaagttccgcgttttaccgtgtatccgaaaactcactatgtcacgccgcgagaacgtattttgcaagcgatggaagacattaaagtcgaactagcgcaacggcgtaaggtactactggagaacaataaactggtagaagaacagcgtttgacccagcgaacccagtttgatttggaaatgatgaatgaattgggatactgctccgggatagaaaactattcacgttacttatccgggcgcggagagggagaggcgccgccgacgctgtttgactatttgcctgccgacggtttgctgatcgtggatgaatcccatgtgactattccgcaaatcggcggtatgtacaaaggggaccgttcgcggaaagaaacgctggtggaatacggcttccgtctgccgtcggcgttagataaccgcccaatgcgctttgaagagttcgaagcgttggctccgcaaaccatctacgtttcggcaacgccgggcaaatacgagctggagaaatccggcggggaagtggttgagcaggtggtgcgtccaaccggtctattggaccctattatcgaagtacggcctgtagcaacccaggtggatgatttgctgtccgaaattcgcaagcgggcggcgattaacgaacgggtactggtcactacgctgactaaacgtatggccgaggatttgaccgattatctggtcgagcatggcgaacgggtacgttatctgcattctgatattgataccgtcgagcgggtcgaaattattcgtgacttgcgcctcggtgagtttgacgtgttggtaggcattaacttgctgcgagaaggtctggatatgccggaagtctcgctagtggcaatcttggatgcggataaagaaggcttcctgcgctctgagcgctcattgattcagaccattggccgggcggcgcgtaacctaaacggtaaagcgatcctttacggtgacaaaatcaccgcctcgatggagaaagccatcggtgaaaccgaacgtcgtcgggcgaaacagcaggcgcataacgaagccttgggcatcgttccgcagggcctgaataagaaagtcggtgatatattgcaactgggtcagccttctctacgtggcaaaggcagaggtaaaggcggtaaggcggcggcagaaagtgcggccaactatgatgcactgacgccgaaggcgctggatcgcaagattagcgaactggaagcgcaaatgtatgtccatgcgcagaaccttgaatttgagcaggcggctgaattgcgagatcaggtacataaattgcggcagcagtttatagctatttcatgatgtcgggttgttcagaaagtgagccgttagtggtggatgctataaatcgggaatttctgcttgtcgcatccgtcattcctgattaatgtgtgcggctgataaattcgtcacctaataacatgtgagatatataatgagcgaccacttgtcgaaagatcctctccacggaattacgctggagcaattattgaccaagctggtggagcattatggctgggaagaactggcctatcgcattcgcattaactgctttatcagcgatcccagcattaaatccagtttgaagtttttacgccgaaccccttgggcgcgcactaaagttgaagaactgtacattcatatgacgcaaaaaccggtgtggatgaaagacgtcaactgagcgttttttattcggttgactttagcccttcaggctcgcgaaagcgggcctgatttgttttatgctatgggagtctggttttatatataagctgaacctatgaaatagcttccatagttgtgcaatgatgtatttttatttcactgttttttcattagttttattaacagataaaagttttacttttttattttttttgtttgtttcatgttaatgatttatcctcttaagatattgtggatatttaagaaaatgcaaaaaataaaaagaatattttaccgctgtatataggcatgctttctgtggtgaattgtttattcttgaccgtaaattactttgccgatattgtcttgaaaaattaatacattatatccttaaattaaataatggctttagccgttttttttgtttttattatttagcgacgctgtgggtttatcttttattttatattgcagttatggacggttcaaatgaatggaatctataaaccccatttattattttctatttttattttaacgccagccacatcattacaggcgaaacctgttgaagatgaacaccagtcttacatggaggttacaggccagattttttcgccaggaaacatgctgcgcagctcttatcagcaggaacagggcaaactggccaaaattgccggcggaacaaatctgattacgccagaggatgaggggcgtctggggactttgcaggacgcactggattatcagccgggtttggtgatacagaatttttttggcggggtcgatcaaccgcggttgaatattcgtggctctggcgtgcaaagtgcgcctttgtcacggggtgttactttattacaggatggcctaccgttaaatgatgccgacggcggttttcatattagcctgttggagcctcgcgaaagtaaaattatcactgcgcggcgaggagcaaatgccaccagtccggtgagcaacgcgctcggcggcgaaattgattttatgtcttataccggtgccgatgaaaatgggcgggcacgctacgaatacggtagctttggtcgccacggatggcagggcgcgctgggcggtagcgaaggcaatctggacggacgtatcagcgtgagcggcgatcgttttagtggctatcggcagcattcgtcttcacggcgaaatgcggttagagccaatattggctatgaagatgagaactttgccagtcgaacttggttcagctggaccgatcttgcttttgacgtggcgggttctttgtctcaagagaaagttcagaccgatccgcgttcggtttttccaatggtatggacgcgcgatcctcaccgtaacgtcgaacaggctcgaatcgccaatcgccttagctggcggggcgaagattggaaaaatgagctgggcgtttgggcacagcacacccatgataactttgtgacgccggtggtctacgtgctcagcgctggtaacacttacggcgcgcagtggcgaaccgagctacagcggggggattgggattatcgccttggggcctcggcagaacgctccgatatggagcgagatttacggcaaaatcggcgcgggacgcccgataatttcaagttgctcggcgcgtacaccatgctggcagaaaatcagaatctggcttttggtgccggctggcagataacagagcaattacgcgttgataccgatttgaaaggtacgcattccgttcgcaatgccaaatcccgcgataagcgcaatgggctggatcaggattggtattttctctcacctaaattgggagccgtttggttcaccggcagcgatctgcgttggtttaccagcctgaactggagccatgaagcgccgagttttcgtgagattatctccaataaaggcgagctgaccctgctacgcccgcaaaaagccgtgacgtgggaagtgggaggtgaaggtgcgttaacccgcagcctaaaatgggatgtgacgctatatcgcagcctgattgacgatgagctgattaccacttatgacagcgaaggtcattcgataggcacttttaactacgcggataaaaccctccatcaaggggcagagattgggctgaaagggcatattccgatcagtgataacagtatcgaatatcgtctggcatggacttataacgattttcgtttccgtggcggagaatatagcggaaagcgaattggcggtattccgaagcaaattattgccgcagaggttttatataaatggaataactggagtattgggccaaatctgcattggttgccggaaataacgccgattgatcatcttaatcgcacggacatacaggctcgcgataaatatgcggtatggggaatgaaagtcgattatcgccatcctgacggctggtctgcttatctcagtatggataatttgaccgacaaactttatgccactgcttcggcaacggagcgagaagtaacatcgaaaaagagtaatacactatttcctggcatggggagatcaattaatggcggagttacctatagtttttagcgctaggcaacttatcacgcccatttttaatttactttattaatatttttagggcatggggtaagtgccatcacgaccttactctttattttaacggcgctatcttaacaatgagtattctaaaactcgcgattattgaataatgcatcggatgctgagatgaatataaaattgcagttgtacagtttttttattttattcggatttttatggtttccgacaatttgtttagcggaaaataatagttttattgatatgaaccaacgtgcggttagtttacttgaaccggtcaagcgtgcggtggttattccaataccggcagcgtcattactggttagccttgaccgtagcactcagcgtctggccggtattcatccttttgccaaagttgccgcgcaggaaggcatgctgagccgcatgtttcctgaaatcgatcttttacccagtgacacagttggtgcgggttttactcccaatattgaaaccttactggccgcgcagcctgatttagtctggcaatgggggcatttgggcgatgatattgttacgcctattgagctggcggggctaaaagtggcgttaattttgtatccgtatcacgacgatagccggatgcagcagtggataacactgatgggacgctccattggtcagaatgaaagggcgcagcaaataattgcctggcgtcagagaacgttagctgaagtgacacaaaaagtggcgcaaattccgcagcaacaaaaagtcagagtactttatctgtcgcgcttcctttcagaaatacacaccatcggtaaaacctcccacactaacagcgatattcagcgcgcaggtgggctgagtattactgcggattttggcggcgctcgcaccattaatcaggaacaaattatggtgtggaatccagacgttattttattgggcaattttgagcctgggcttctccctcgtcatatttatcaaagcccggccttagctgaagtggctgcagtgaaaaataagcgcgtctataaaatccctatcggcggttttatctgggatgcgcctaatcaggaaacgccgctgtattggcagtggctttccatggtgttttaccccgataagatttactggccgctgcgttcggaaattgttcgccagtatgattttctttatcgctatcagcctacagataaggagttggatagcattctgcaaatggacgctaataacgtgacgaaagaatatagccaacgtttcaaggacagagaatgaatatttccagccgtatatatggacgaaataaatttttctggttaataactccgggtctattgctggccgtcatgttgcttgcattgtgctccggacgttatccgttatccgccgggaaagtcctcgctattctggcatcatcctttatttcaacagaaagtctggcggagtttgttcaatggacacctattgaacaacgcgtggtggagtttattcgtttgccgagaatgcttattgcgttgctgaccggcgcgggtttatcggttgccggagctgcgcttcaggggatatttcgtaacccgttggtagggccgcaaattatcggcgtatcctcaggtgcggctttgggaggcgcattaggaatagttttattttcctcgctgatgatgatttccggcctggcttttattggcggctttttagctattttgctggtttattttctcagtcgcagtagcggagcctccagtattttgatgctgattctggccggcgtggtgattagcgcctttttcgccgcgttaatttctttagtgacctattttgccgatccgaataataccttgccggcgattgttttctggctgatgggaagctttgccaccgtgacataccacaagctagccttggctactttaccggtactttgcggtttagcgctgctttatgctctgcggttccgtattaacgtgctatcgctgggggatgaaaatgccgccgcgctgggcgtgccggtggagaaagtgcgttggctggtgttgatttctgttgcgctgattacttctgccaccgtagccgtggctggcactattggttgggtcggattagtggtaccgcatattgccagaatgctggctggtcctgatcatcgccagttgctgcctgcctcggcaatcattggcgcaatttatatgatggcgatcgatacgctttcccgcagcgtgagcagtgcagaaattcccttaggtatcatgactgccttgataggagcgccggtgtttgtctggctgctgcggcaaactcagcagaaaggatggactcatgattaatatcgatcggttgacgttaatccgaggagaaaaaacgctgtttgaacgactttccctccagatagagcaaggcagcgtaaccgctattctgggcgcgaatggacgagggaaaactacgcttttacgcctgatcatgggcgcgattaagcccacttcgggccagatttccgttgctgcgaatattggctatgttccgcagcaggaaaatgcggtttttccttatagtgtcagaactatggtgatgctggggcgagtgcgacacatgggctggtttgcttcgccaaaccggcgcgatagcgaagtgactcagcaatgtctggattgcttcgggctgtcgccgttggcggataaaccggtgaatcagctaagcggaggcgagcggcagttggtgagtattgctcgtgcgttggccagcgagcctgagattctgattctggatgagcctgcttcggcgctggatctggcaaatcaggacaaagtgctcagcgggctgcgggatttatccgcccgtttggagatgacggtggtgttgactactcattctccgttacacgcgctgcatattgccgatcggactttgttgctttatccgcagactgacggggaagacacgcaggtagcagagcaaacgaagggcgtcgcctttggcctaacgcgggaggtggtaacggataagaatctgacgcagctttatcagttgccggtacacgtagataagttggattttgcgggaaaaactcgggatatatttatgccgttgtttaactgatccagcgtgttctgtcggacataagcccggtaaataccgggcttgagaggtttaaccgagtttttgcagcgtttgctccaatgcctgacgcagtaattctcgatcgtgacgataaggaatatccttagcttccagcggctgctgagtcacgatacgatcttgtacaccgctagtgtctaccgttgggctaaccactaccgcatcaatcattttacgaccgattttgctttccatcatcgccagcttgtcctgtaacgtcagagcggcggcggccacgctgagttccttaccaagattaccaatgtaaatcatgctggcggagctacggcgcaacgcctgagttaaatcatccagcaacaacaacggcatcaggctggttaaaaagctgccggggccgatcaaaatcaaatcggcctgactaatggcttcaatggcttctcgcgtagcgctaacgtggggagacagcgtcatttcctgcggcatatgggtcaattggtcaatattgacctctccataaaccgggtgcccttcgtgatctaacgcctgtaaatccaccggctgctcggacatcggaatcagccaggcgtccacttttagcaggctgcgcagcagattgatggcttccatcggcctgacactcaagtgatccagcgcctttaacatcaggtttccgagattatggccggataattcaccattaccgctaaaacggtactcaaacatggcagaagcaacgctgggttcagtaatcaactggttcaggcaatttcgggtatcaccccaggcaataccgccttcagagcggcgaattcggccagtagaaccaccgttatcggtggtagtgacgattcctgtcaggcgtgatcctaatggagaaagggctgacataacccggcctaaaccgtggccaccaccgagtgcaacgactcgatccagatcggctaatgtgcgatttcgcataagtttcctatcgatttgccccaacccggtttatttatcaaccaaaggcataaaaatttgccataagttaacggatttatggcaaaaacgcgataaaagccgcagtttccgtgatattggacaagaatttatcccgcgaatgatttagccttcaaacctcgtttcatggtctgctaagtcgttgtatataaaaatatatagcgcaaagacccgattggctatcccgacgttttagcgctagaatccttgggaaaaccacggtttctcctgacagtctttgggccgtcgctgaaatcaaactcctagcctctgtgtctacgttgctcacgcaatatgatgctttggccgtggcattgagccaccagggtgcgaggtagaaatgcctgcatctcccgtatttggaaaggtgttatggtaccgcaactgaccgacgcatttgcgcgcaagttctattacttgcgcctatcgattactgacgtgtgcaattttcgttgcacctactgcttgcccgatggttatcaacccaatggggtgaaaagctttctgacgctggatgaaattcggcgcgtcagccgcgcttttgccgaattggggacggaaaaaatccgtctgaccggcggcgaaccttccatgcgacgcgattttaccgatatcattgctgctatccgtgaaaatccggcgatccgcacgctggcggtgacgaccaatggttatcgtctggctcgcgacgtggcggcgtggcgcgatgcggggctgagcgctatcaacattagtgtcgatagtctcgatccgcgccaattccatgccattaccgggcaagataaatttcatcaggtcatgcagggcattgataaagccttcgaagtcggttttgagaaagtcaaaatcaacgcggtattgatgcgtgatgtcaacgatcgcagcctgaaagcctttctggactggataaaaccgcgcccgattcaattgcgttttatcgaactgatggaaaccggtgaagggagcgagctattccgtaaacaccatgtttccggcggagtgattcgccagcagctactggagcaaggttgggtgcagcaagaccgtgcacgaagcgacggcccggcgcaggtttatcgtcacccggaatatcagggtgaggtcggcttgattatgccgtatgaaaaagatttctgtgccagctgtaaccgcctgcgcgtatcggccatcggcaatctccatttatgtttgttcggcgagcaggggattcctctgcgggatttattatccggcgatctgcaacaggacgaactgaaagaacgtattcaaagcgcgttgcaaaccaaaaaacagactcattttctgcatcaaggcaacagcggtatcacgcagaatctctcttttattggcggttaacgcgttggcgcattgcgctatatcaggagtatttatgacccaattaactcatattaacgccgccggcgaagcccatatggtggatgtttctgccaaagccgaaaccgtgcgtgaagcccgcgcggaggcgtttgtagaaatgcaggccacgacgctggcgatgattattgatggtagccaccataaaggcgatgtgttcgccacggcgcgcattgcaggtattcaggcggcgaagcgaacctgggagttgattcccctgtgtcacccattgatgctgagtaaggtggaagtcaatttgcaggctcagccagagcacaatcgagtccgaatcgaatcttgctgtcgtttgaccggtaaaaccggcgtagaaatggaagcgttgacggccgcttcggtcgccgcattaaccatctacgatatgtgtaaagcggtgcaaaaagacatgattatcggccctgtgcgtctgctggcgaaaagcggcgggaaatccggtgatttcgaggtaacagtatgattcaaattctcttttttgcgcaggtgcgcgagctgctcggcaccgagagtttacagctggtggcggaatatcctacggtggaagcgttgcgccaggctctgtgtcagcgtggtgaccgctggcaactggctttggacgaaggaaaattgctcacggcggtgaatcaatcgctggtcagttgggatcatccgctgtctgctggagatgaagtggccttcttcccgccggtaaccggaggctgaggatggaaaatactcgcattcgcgtcggcgcggagccatttaacgtcggtgatgaatatcaatggttggctcagtgtggcgaggacggcgccgtcgtgactttcaccggcaaagtgcgtaaccataatttgggcgataatgttagcgcgctgacgctagagcactatccggggatgacggaaaaagcgctgggagaaattatcgccgaagcccgtgagcgctggccgttgcagcgagtttcggtgattcatcgtgtgggatcgctgtatcctggcgaggaaattgtgttcgttggcgtgaccagtgctcaccgcagtgtggcctttgaatcagcagagttcatcatggattacctgaaaactcgcgcgccattctggaagcgcgaagcgactcccgcgggtgagcgctgggtcgaatctcgcgattctgaccatgaagcggccaaacgctggtaaactcatgtaaataatgccctaaaatgcctattttaactcctagggggcgggctgttttgtggtaatcttaggaccaggtgggccgtcaaggacggtctgtatcattgttcacatgcagaaggtaattaccatgggccactatccacgctctaatggttcgattgtcgaacgtgctaacacaggcattcaggcatatatggcgcaggtatatggctggatgacctgtggtctgttattaaccgcctttgtggcttggtatgcggcgaatacgccggctatcctccactttgttttctctagccagattacgttctttggcttgattattgctcagcttggtctggtatttgttatttccggtatggttaaccgcctgagcggcaccatggccaccagcctgtttatgctgtattcagcgcttaccggtttaacgctttccagcattttgatcatgtataccggcgcttctattgctagcacattcattatttgtgctgggatgtttggtgccatgagcatttacggttacaccaccaaacgtgatttaagcggtatgggcagcatgctgtttatggggctgatcggtatcgtgttggcctcactggttaacatatggctgaaaagcgacgcgttaatgtgggccgtgacttacatcggtgttgtggtgttcgttggcttaaccgcttacgacacgcagaaattgaaaaatatgggcgctcagttggacgctaacgataaagacggtttccgtaagtatgccatcgttggtgcgttgaccctgtatcttgatttcatcaacctgttcctgatgttactgcgtattttcggcaaccgtcgttaatttgggtgattgagggcagcgtcaaaaccattcatacgttacgctgtgattgaaagacaaaaaggccaccttatgaggtggcctttcttttgaatgacaacggcggtgatattttttcgatgattagtgttatctatcaaattgtaaatcagaatagttccgctcttttcccctcatttcaatagccacatcttgcccatcaggcaattttacgtctgaacatcccgtaagcggcgctgcccgttgtcgcggtaatcaccaataagggccacaggctgtgccagataatatcgaagctggcatccttcaggtaaatctgtttggtgatatcagtaaagtggcggataggattaatccaggtgatgttttgtagccacaccggcatattttccaccggcgatacatagccggaaagtagtatggcaggcatcataaacacgaataccccgataaatgcctgttgttgagtcgagcacagcgatgagatcagcaagccaaacccgaccagcgatagcccgtaaatcagcatggtgccgtagaatagtgccagcgacccggcaaagggaatttggtagaagaaaatgccgataaatagcacaattgaggcctgaaaagtcgcgacaatcagcgctggcaccgctttaccgataaatatctgccaggtggtaagcggtgataccaacagctgatctagcgttccctgttcccgctcacgtgctaccgacagcgaagttactatcagcacgccgatggtggtaatcatcgcaatcaatgacggaaccacaaaccatttataatccagattcgggttataccaatttcgtactaccagtgcgctgttattcggttttatctgtccctgcgtcagctcgtcctgataattttgaattatttgctgaatataattggccgctatctgggcactgttggagttacgtccgtccagaactagctgcaatggcgtggtgtgtccgttggctaaatcggcgctgaactgctcgggaaaacggatcagtaatagtgcgcgctggttatcaatcgttggttggatttcctgcgggctatggagcagcaaaacgttagagaatgccttcgccttggcgaaacgctgcgtcagttcaattgatgcttttccgctgtcttcgctataaatagcgatggtagcattagtcacttctagcgtggcggcgtaggggaacagcaccacctgtaaaataaccggcataatcaatattgcccgggtttgcggctcccgcagcaaagactgcaattctttgataatcaaagtataaagacgatgaaacatcatagctccttgctcagtcgagtcggcgttgggttttccacgccgtcaggccgataaacacaatggccgaagcgatcaggaataacaggttaatccacagcactgtgccgatatttccggctaaaaacagggtttgcaggctgctgacgaagtaacgagcggggatgatataagtcacggcccggactatcgcaggcatactatcgatctcaaaaataaaaccggacaacataattgatggcagaaatgccgcattcagcgccaccatggctgcgttaaactggttgcgagtcacggtagaaatcagcagccccatgcctaaagtgctggccagaaacaggctggtcatgacgaataaaatccacagagagccgcgataaggcaccccgaggataaataccgagaccgccatacacagcaccatggcgatcataccgaggaagtagtagggaataagcttggaaagcaatagctcgctacgcgtaacctgcgtggagagcagggcttccatggttccgcgctcccattcgcgggcaatcactagcgaggtcaaaatagccccgattaccgtcataataatggtaatcgcaccgggaataataaagtgctggctaattgccgctgggttaaaccaatagcgcaactgcacatcaatcagtggtgcgttggtttgccctagattttgcgattgttgttgctgccagatttgccaaattccttgcgcataaccttgcacaaagttggccgtattaggctcgctgccgtcggtaatcacctgaattggagacgtatctaatgggcgatccagccgttgggcaaaatcattgggaataacgatcagcccgcgaattttccctgcttgcattgcctgaatcagcgcctgacggttatcgctgatttgggcggcaatataaggcgagccggtaaaggcgttggccaaatcctgtgccggcttgctttgctgctccatcaaaatgccgacatgtagtttgctggaatccagattgataccgtagccgaatataaaaagcagcatgattgggatgacaaaagcgatcaggccactactgggatcgcgtaaaatttgtcgggtttctttgcggcacaacgctcgcaggcgtcgccaggaaaaaccggtatcctgataggtttcgctgttatctatcggagcggcagggtgctcagacatggctctgctccttatcgtagttttgtactaactcgataaatgcctgttccatggaaggattagggttatcgtcgcgggcgacctgctgtttcagctcatctggcgttccggcggcgatgattttcccacgataaaccagaccgatacgatcgcaatattctgcttcatccataaagtgcgtggtgaccatgacggtgacgcctttgtcaaccatgccattgatatgtaaccagaattcgcggcgagtcagagggtcgaccccggacgtgggttcgtccagaaacagaatgtctggttcatgcatcagtgcgcaagccagtgccaaacgctgtttaaaccctagcggcagagaatccggcgtttgattgagaatcgacgtaaagttaaaggcttcggtcatatcacggattttatcccgctgtaccttgccttgcaggccataaacaccggagaaaaacttcagattctgcgcgacggtcaggttgccatacagcgagaatttttgtgccatatagcccaaatgctggcgtgccttgcctgaactggttttcaaatccatgcccagtaccagcgctttaccttcactgggaaccaatagcccacacatcattttaaatgttgtagatttccccgccccgttagggccgagcagcccaaagatttcaccgcgttttacctgaaaatcaacgtgatctgttgcggcaaaatcgccaaattttttcgtcagcctctgagcttcaatcacggtttcagtgtgatcgccgctgaccgtcggcatgattttcgctaaagcggattcactttctggcccaccgccgagcagatcgataaaagcatcttcaaagcgcggatcggcctcttgaatctcagtggttggctggtttaactgctgcaagagctgttggcgatcggcatcgggtttaagaatcaaacggacatatttaccctgaatgactccgtcgctgaccagcggtagcgttaatgcccgctgtaaaagttttcggttagtgccgttttgcgctgacagcagaatagtgcggccgctcatacgttgggtaagatcttgaggcgcaccgctgtatagcaatttaccttcgttaagcagtagcacctcacggcactgttcggcttcatccagataggaggtactccagagaatcagcatgccgtcactggccagttcgtgcaccatgcgccacagttctcggcgggaaataggatcaacccccacgcccggttcatccagcagtaaaacctgaggttggccgaccaaagtacaggctaaaccgagtttttgcttcatccctccggacagttttccggctaatcgatcggtaaagcgcgtcagatcggtaaagctgagtagacgatcaaaagtctgacgtcgttgctcgccggtgacaccgcgcaggtcggcgtacagcgtcaggttctccatcaccgtcaaatcttcgtataacccgaatttttgcggcatataaccaagaattgaatgcaactggcgatcgtttttaattgggtccagacctaccactgaaagctggccactgccgggtttcaacagtccggctagcattctcagcagagtggttttccctgcgccatccgggcctaccaatccggtaactgcaccgctgcgtatttccgtggttaaactggccacggccggatgatccagtccagggaaggttttctctaccccatccagagtaatcaaatgctgtacttcagccatgacaatgcctctcgattaaggttgtgagaagcgaatagtcaccggcataccctgacgcaattcttcatcggcatcggtaacaataatgcgcaggcgatagaccagatcggtgcgtaaatcgggcgtttcaacggttttcggggtgaattccgcggttggagaaacgaaacctatcttaccgtgatacggcttattgggccggctgtcggtatacacttcgatttccgcgcccggtattgcctgacctaaatggcgctcatccacataggcgcgaatccagaccggagtggttaacgacagggtgaatacggtgttgctggcagacaaaatggtgcccggttcaacggcccgggtcaaaatagtcccggcagaaggtgaggttagcgtggtgtcatgcaggtttaattgagcctgcgccagttcagcttccgcctgtgcgacattggcttcagcctgagcaatttcctgcgggcgattgccgctcaggaattgggccagtttatctttggccgcttgcagcgcagcctgcgcctgattacgtgacgtacgcgcatcttccaactcgttagcggaggtggcttttcttgaccacaaaccctgctgacgttttaaatagctatcggcgtagttaaaggctgctactttttgcgccatttcggattttacctgtgcgatttcctccgctcgataaccggctttcaacagcgcgagctgcgcttgcgcgctggcaagattagccttcgcctgatttaacgcattgttatacgggccctcatccaactgaccaagacgttgacccggctggattttatcgccttcatcgacatccagtgaggccagacgaccgccgacacggaagcccagattcaccgtgcgaatatcaacgttgccatacagagtgagcgttccattttgctgttggcgatagtagctccatccatatagtgccgccgcaatgacggcgataacgacgactatcactgcaatactcttgcgattcataacattccctacctgcaaacatgtaattattgctgcgccgcctgatgccgcagcccgttgagaagaaggtcgatatgttcgataagcacctgatttattaacttattttcggcattgccaatgtcgttccaacccgcctgatagcgtatggtttcccgcgccatgcgaaatgccaatacttcgcccaataatgcatgggtatgaatgatggttttggtagcaagagcgtcagcgccaatgtaattcgccaacaataaattaagtttatggtgtagtggggcaatcgcctgttgatgaatcaatggataggcttcggtaggggaaagctgttcccgagccataattttgctcagattaatggtttccggctgagtcattaaatggctgaattgcagcacaccctgtcgcacataatgtaactgtcgttcagcgcattgctcggatggcggcgtttgcaaaaactggtcaatttcggccgccagaggcacgaaagcctgacgaataaaatccgcaatctgctgcgctaccgccagatagagtttttctttggaaccaaagtagtaggtaatagcagcaatattttggtctgctcgctgggcaatatcgcgagtggtcgctcctttcaaacccaattccccaaacagctcggtggcggcgcgcagtaactgttgccgtgcctgttcaccgcgcaacgttaccggaacgttggaatggggcatgataaagtctcccttatggatagaatgaatttacgctaaagccttatggttaggctggaaataaattaatcaatcatatgattaactttaggccataagtataggcctgtaaagatggggaataggaaaggatctttgactggcgtaaggcaatttttctacagtttttacctataaattcatctgattgtttaaatatctcatgttttcacaaaaatctgatataatccgcctcaatggtgcactgcagtttgtgccaatcctcgtggtaaagcctcatttaatacctcgtctgatcatcttcccttgaaactgcacctgactgaattgttaggatggggaagatctggagtttctcgtaatatgtcatttgatactctcggcttaaacgccgatatcctgcgtgcaattgaagagcagggctacctcgtgccgacgccaattcagcgtcaggcgatccctgtagtgctgcaaggccgtgatttaatggccagcgctcaaaccggtactggtaaaaccgctggtttcaccttgccgctgttgcaaatgctcaatgataccgcgcagccgatcaaaggccgccgtccggtacgtgccctgattttaaccccaacgcgtgaactggctgcacaaatcggcgaaaacgtcgaacagtacagcaagtaccttaaattacgttcgctggtggtctttggcggtgtgagcattaacccgcagatgatgaaattgcgcggaggcgtcgatattctggtcgctactccgggccgtttactggatctggaacatcagaacgcggttgatttgtctaaaatcgaaattttggtgctggatgaagccgaccgtatgctggatatgggctttattcacgatattcgtcgcgtgttggctaaattgcctgcaaaacgccagaacctgctgttctctgcgaccttctccgacgaaatcaaagggctggccagtaaattgctgcacaacccagcttccgttgaagtggcgcgtcgtaacactgcctctgagcaaatcacccaaagcgttcattttgtggataaaaaccgcaagcgggaactgctttctcagatgattggcagccaggattggcagcaggtattggtgttcacccgaaccaaacacggtgctaaccatttggcagaacaattgaataaagacggcattactgccgccgctattcatggtaataagagtcaaggcgctcgtactcgcgcgctggccgactttaaagacggtaaaatccgcgtattagtagcgactgatatcgccgctcgtggcttggatatcgatcagttaccgcacgttgttaactatgagctgccaaacgtaccggaagactacgtgcaccgtattggtcgtacaggccgcgcggaacgtaccggtgaagcgatctctctggtttgcgtcgatgagcataaactgctgcgtgatatcgagcgtctgctgaaacgtgaaattccacgtatcgcacttgaaggctacgagccggacccaagcatcagagctgagccgatccaaaacggtcgtcagggacgcggtgcttcccgtcctggtatgggccgtggcagtgccacccgctcacagggcggtgcagttgccggccgtggtgatagccgcggcaacagcagcaaacctcgcagtcagggtgacggtcagcgccgttcagcgccaccttcatcacgtccgggcagccgtaaaccgggcgagtaaatcgttcgagcttagggaaaaccgctcattgccgagcggttttttttgtcctaaattcggctattccgggctaaattcgcgttatttcttgtcttgtcgcaaggttcgctcgtatcattgccggtcttttttagggggtattttgatgcagatattcccaccttatttttcagcaggcaggtaatcaggtcatgcgggtacttttggcaccgatggaaggcgttctggattcactggttcgcgaattattaagcgaagtgaatgattacgatctctgtatcaccgagtttttgcgggtggtcgatcagttgctgccagccaaatccttctatcgttcatgccctgagttgcatcatcaaagccgcactccgtctggcacattagttcgtattcaattattaggccaatacccagaatggctggctgaaaatgccgcacgcgcggtcgaactcggttcctacggcgtggatctgaactgcggttgcccgtcaaagctggtcaacggtagcggcggtggggcgactttactgaaagatcctgagctgatttatcaaggggctaaagcgatgcgcgaagcggtgcccgctcatttacctgtgacggtaaaaatccgtttaggttgggactcgagcgatcgtcagttcgaaattgccgatgctgtacagcaggctggagccactgaactggcggttcatgggcgaaccaaagaagagggctatcaggccgatcgtattaactggcaggcgataggtgatatacgtcgcaggctcactattcctgttattgctaacggcgaaatctgggattacgccagcgcgcaggaatgtatcaaagtgaccggctgtgacgcggtgatgctagggcgcggcgcgttaaatgtcccgaacctgagtcgggtggtgaaatataacgaacctcgaatgccttggcccgaggtggtgaagctgctgcaaaaatatgttcatctggaaaagcagggtgacaccggtctgtaccacgtagcccgaattaagcagtggctaggatatttacgtaaagaatatgacgaagctaccgagctatttactgaaattcgcgcgctgaaaacctcgcaggacatcgcgcaagctatatgccgttaacggatttttgctaacggcataacattgacccgaacaaaacccctgctacgtgaaacgcctccttccagcaaacaatatcagatatgtaccagacagcctcgtgcaataaacggggcgagtacttctggcaattcggagaagttattccagcgtaaatccaagcgctttaactggctcaattctgagaagctttccggcagggtggaaagtttattggcgcgtaaatccagactgtgcagatttttcagtgcgccaaagttttctggtagctgggagagttgattaaagcgaaaattagcatcagttagctggggcaggacacaaaactcattaggtaaataatccagacaattatctgaaatatccagcacgtgtagttgcttcagggcggcaatttcaggagcgattgaagcaattttattcttcatcaaatgcaactcttgtatctgatgaaggtgccctatggccgaaggtatagctctaatcgcattgttatacagtcgaagctctttcaatgctgagagagaaaatatagctgagggaatttcttccagctgattatcggtcacatttagataggtcaaatgctgtagctcagccaaagttgcgggcaaatcactcagatgattatcgctgatataaagatattccagctgttttaacctcccgagttcttgagggaggttttgtatacggttatgaccgagatctaacatgcaaagcgacgataattcgccgatactggccggtatcgatggaatgttgttgcaggataaattaagtacctgcaacttctgcaatgagataatctcttcgggaaacgctgtcaggcagttattgtacaggctgagctgttgtaatcctgacattgtgcttaggttctcaggggctgaacttagctgtttgttatccagattactaacctgaatggcccgtttttccaccgtggtagcgattttcgggtgctgatgaagcatcattgtattgtgccttttctttatgctttgcctgatgtgccaagcataagcttttttgccgctagcgatgactttttcccatggtataaccatgggctgagtcagtacgtatcctttattgtgaagattgttctgcgggcgagacaaaagctaggcaccacttcatttcttttccctgccgggtaacaaaaacatagtcattcatctcggaaataggcaagcctgggaaggaacgcagaacatgctgaaaatcagcatcctgacaggaagaattcagcgaactcagaaataaaccaccggcttgggaaatctctttttctgaaatattgggggtgtagagattaggtttttcattattagaccatttttccgccataaggggacggtctggggcgtagaaagtcagccactgtgagaaatagccaccgccgacgtagcgaagtggaacttgatatttatctcgccagatttgattaatttcggcgcttagcggttggatatagttaaatttgctgcctgcgccgcgaatatctttatacaacactgtcgcgtaacccagacaaaccgcagccgcgacaattaacagagatagattgatgcctcgccaggatttcactcgttcgacattaaggaagcaaagagcgataacaggggataatacggtaaaaggctgtaaccattcggtgattcgtcccccgctgttaaacaggaaatagccgaatatcagtataagtggcggggtaaacacgaaaagaacggctttcttttcgtctgagtccggctgtaccaatgtggcattcagcattttgagtagcagaatgatgatgataatggggtagaaaaccacaagagcggaaaccagtactttactgttaagtcccgcgtttatttgtgaatcaacccaattgaaggcggcaaagtcgtgctgataaagccaaaaaatattgggggcgataataagtaaaaatagtaataacgaaagatagaactctttgctattgcaggattctcgtccttttttcgtcgagaaggcataaataagcataaacggaaaaaatgcaaagctggagtattttgacatggcggctaacccgcaaacgacagctaaggcataccagtaagctttattatcataaatagattcaacgaaaaataagaataagtacggccaaaacatcacaagtagataattgtcattataagaaattatatcaaaattgataacgccagataaatttagcgcgagcatagagaaaaatgcgattttgtaactgccaaacagtcttcggctcagaaggaaaacaccccataaaccgacggcaataacggtaaaatgcgaaacataccaatataacgcaaggtttatcagtgggttgatgagtagacctatagccgtaactgcgccaacgatatagggatttttcggtgagccaaattcgaggctattcgcccaattcagggactctacggcatcgtagggaacagccggatctagattagatgagatcgcaatccatattacgctgtaaattaatataaataatattgcgccggtcttgtagttatcgtcactgccatatgtcatttagaactaaccttactcttataattgcaaatcaatttgtcattattataattacgcgtctgtgttcaagtgctttctcctttctgtttagtgattgtttaaatgtgttttttataaatggaaatagtgacttaatttaacttagatttgtttttttgtttaatgttcatctaggaataacttaactttcaataaggctatatcttctttgctattagaataactaatggaaattaacgatattcagagaacgtttttttatgttagtcgcgcgattgtcaataatcgtaagcgacccttttaaatctttgtaacaatgatttaaagaatgtctgatgcgcagtttatatgggtaacttatactgcttggagtccaacccacgtcacctaagccaatccatatgcatgtgaaaatacgtttatcaatattaagtctgtttattttatcggctacggccttgagcgttcctgtgacgagtttcgccaccaccagtgctggcgtacaacaggcagctccgttggagttagcctctggcagcgcgatggttgtcgatttaaaaaccaacaaagttatttatagtaataatcctgaccacgtagtacccattgcctcaatcactaaactgatgaccgcgatggtggctctggatgccaaacagccgcttgatgagattatttcagttgatattcatcaaactaaagaattaaaaggtgtattttcgcgagtgagagtcaatagcgaaataaaccgtaaggacatgttattactggcattaatgtcatccgaaaatcgcgccgcggccagtttggctcaccattatcgcggtgggtatagtgcatttattgctgctatgaatgctaaagccaaatccttaggcatgacccatacccattttgtagaaccgacagggctatcaacccagaacgtttctactgcgcgcgatctcagtaagttgctgctggccagtaagcagtatccgctcattggtcagttgagtacctctactgaaaaaatggcgactttccgtaatccgaattacaccttacctttccgtaataccaatcatctggtttataacgataagtggaatattcagctgacaaaaacgggttttactaatgaggcggggcattgtctggtgatgcgcacggtcattaataatcgtccggtcgctttggtggtattagatgcttttggtaaatatacgcattttgctgatgctaaccgattacgcagttggcttgaaaccggcaaagcagcgcccattccaggtgcggctaaaagttatcgacagcaaaaagatgctcagggacgtttagcgaaagtatctgaatgatagaagattaagaggcaggaatacgcaggatgcaggtgtttaacggattaaaatgaattcgcggtaggataaccgcgaattcaaccaactttaaaaaataagcttgaagacaccggtaatagtcagcaggccgacaataaaaattatcgcgataatccataatataatcttcatttgtttcccctcaaagagagtgaaaataacgccaacccaggctggcaatgtgatctcactatagtttatctttttccatttcgcggtacttcttaccaatcatactgatttttaagacttgactgaaagatagctcaaaccttactaacgccagcacttatgttttgaggtttttcctatccctggattaaaactgttggttggatctattgcctgataaaaagcctttaattcaggtttagccaaatagagatggccaacattatgttcggcggggtattcagcgcctttcgcctgcagaatttctaacatcttatctttgatttcctgcggactctcgcctttcttgacaatataatcctgatggaaaacgtgacacataaaatgaccatagtagagttttgctaccaaacggcggtctatttcttcaggcaaggtttcaaaccactgatcgtcattgcggcgcagagcaatatccaaagccaatatatcttcgaccttatcgctatgaactgaatggtaacgaactgctgcaccggcggcggcaaaacgatgtaaaaaggccttctttccttcgtcagcggtgcaaaccagatagttaccttccgccgttgcgaaaaatcgacgtaaatgctcgttagcttccgctattccctgaccggacattttcagcatcaggtgatgttcatatttatctcggtagcttttcaggcgtttaggaagatggctaggcaaaatacggctgaagccctgcatgacacgatcggtgatattgttgatcaaaaaaggaactttattcagtcgggcatcgatctttccttttagggtaaagaaagtcggcatcttatccgtacccatagaattgatcatgataaaagtgtctttgccataaatttcggcgatatcaaaaacgtcccggtgcatatattctcctgcaaccggtaagtgtttaaaatcacgtaaaatagtacgacgtaattctgtcagcaccttggtgtcattggtgccaatataaaatacctgttgctgagactccgctgggaaagtatctaaacggacggcaaaaactgcgagctttcctgcgcagccggaggcttcaaataagcgccgtttatcagcattaaaacgcgacggcgtatcggcatccacatctcgcactcgttcaacataatcatgatccgaggctttctgctcgccatgaccaatatcttccgggccataatcggcacgggttaaacgccaaagaatatcttccggcgtgtcacccagatggataccaagatggttaactaattgaagttcgccatgctcatttatctgagcaaaaagtgccatttccgtataagccgggccacgttgtattagtgaaccgccggaattattgcaaacgccgccaataaccgaagcaccgatacaggatgagccaataacggagtggggttcgcgaccaaagggttttaagcgtttctccagttcattcaacgtactgccggggaaagcaatcacctgttcggcattattcaataactgaatctgattgagtcgcagcgtgttgataataacaatctggcgatcgtaatcatttccactgggagtggatccttccgtcaggcctgtattggctgcctgcataataatgattttatctgcggccaagcaggcttgcagtatttgccattgctgcattagcgttgcggggaaaacaacggccagagcttccccttgacccgaacggaatccggtccggtaacgtttggtttgtcgctcttttgtcagaaggtaactctcaccaacaatatttttcagttgctgcaataattcctgattgttgtcaccatcggtacgattcatttttctcacctagagtacgaacatcctgttttgctgcgaaagtaaatctgaatagcttatttgttgaaatcgatgctttctttcgttgccatgaagtaaacatgaggctgaggtttctttccctactgtggggccgagtttgtgatctatttcacacactgaaggctatttataaccatgggtgttaatcgcatcggatttgatccagcttatatcaacctgtggctaacagacttaaggcataattgagtagatataaggttttcttacgactattttcctatcagggcggattcaatgagtgagcattttgttgggaaatatgaggttgaattaaaatttcgagtacagaatatccgtaacctattgaggcgaatagaaacgcaggatgcagagatttttgctctcaataatcatgaaaaagattgttatctggatgcttgtgatggcggtcttgcacggcaaaatatcagtatgatattgcgtgaaatgaacccgtcgggtattcggctatggattgtcaaagggccgggaagcgagcgatgcgaagccagccgggtcgaggatttgggcaagatttcgagtatgctggtgactttaggctatcagccggtatttaccctggaaaagaaccgcagtatctattttatcggccaatttcacattacggtcgaccatttggagtctgtgggaaattttgctgaaattgcggtgatgacagatgatccgaatgaattggcagaattaaagctgcaatgcagtctttttgcctcaaccctaggattaaccgcagatatgctggaacctcgtacttatcggcaattactgggcttctaagatcccggcattgcagtaaggtacaaatttggcaattgaccggtgaaaataacgatataggtattctcaccggtaaacagaccattatttttttaatagagttttgagattggcaaaagggttgtgagtagcgacaccctgatctttctgcgcgtcatctccggcaataaccgtcgatccgtattgatcggcttcggtatatttagaatgctcgtgatcgtggcaaaacaggcacaacatctcccaattgctgccatcttccggattattgccgtggtcgtgatcaatgtggtgtacggtcaactcacgcagattagaatacacaaactctctggaacactttccgcaaacccacgggaagagttttagcgctttctcgcggtaaccgctttccagccgggcatagtttttagggatataagccatgggaaccttcaattctgtcgtgtgatatctgaacttattttagcgtgaaagaagattcgtcaccatgattaaggtactggataggctttcctcgtatggagttttagtaaaataacgatagattaacccactgagtcaagagccatagacacgacttgatacaagaaaattttattatatcgatttgggcgtattttatttttatcattcgatttttcatgtagcgaatgggcattaatcgagccatttttctttcatataatggttttttgagactttttccaatgatttaaacggctaagacgttttacactggtagcataattaggctaattttatctggagtaagggaataatccgcccgttgcccgataattattctttgccgataaagttgaggcgatatgaaagaatcagaagtgctggccgaagtcagtaatgaaaaccagacactggtggctgtggtgcaacaagatcagcgtgtggtttatttctatatttacccgttggagtccgttgaagatcgttttccggtgcgtgcctgctgggtaagaaatctgactgcggctccccagttagatgataacgcggctattgagcaggggcttgccccgcgtttggctgcggcctattgtcgaaatattgctggtgaagaagcattggatgcgcaatatattaagattatctggtcagaaagtgatgacggcgcagcgctgtggtatcaggggcaattattggcggtgattcccggctggagtttgtatatcgatcactctgtctgttactccgctagctgtattaaagagaatccactcactttacctttggggtctgcgtctactaatacgcaatatgctcaggcggaacgtactcgacaattttggcgagtctggcagcaggaggaaggtaatccctggcccagtatgcaagtggaatatattcgacgctatgagcaacattttggtccggcgcaaaagtattatgctattgatcagggcagatggccgccaatggcgatctctcagcatgaaaaggatggagtttattattttctgacgctgggtgtcagtattcgtccgcagccttgggttgagattttatttaatgatgatgccgggaaatatcgtcgaatagaattagcgatggcagtggatagtcaatatgtcaacgaagacaacgccgttcgcatggcgagtgctttagccggttttgcccatgttccgtggggaaaaataagctggctgggagaaggccatgcactggagtctgaagtcgcccctcagggttacgaaggctatgtattatcggccaatctatactctgagcacgtcagtctgacgttgccggagcagcagggcgatccggtaaacatttattgggccagtccgatatttaccagtgagcgggagtttgcgcattcgctaccaaacggcggctacgatttgttagcgaaaatgcgtcagcggcaggtgaatcatattttcgcgccaagagaaccggttatttaatcggtcgagtagttgtgttttagcgggataaaaaatttatttttattcttggatgaagcgtacagatttgcggatttacctaataaggtcttaacttaatactgtaatggacgctgtgaatagctaataatcactcagctgataaagcacagaccgtcaggtttattcaatatttggaggacgtatggggattctatcctggattatctttggtctcatcgccggtattctggctaagtggattatgccaggtaaagacggtggcggattctttatgaccatcattcttggtgtggtcggtgctttggtcggtggctatatcagtactttctttgggatgggcagagtagacggctttaacattggtagctttgtcgtcgcagttatcggtgccttggttgtgctgtttatctaccgtaaaattcgtagctgatttaacaagaaagactcatcttctctaaagaaaggtggcaatcacatgtcacctttctctcatcaaactatcatttctctgtaataaaaatatccgttaatggctcaaagataacctgcaatctgagagacattctatgggccaggcattacttcaatatgcgccagattatcctgatactgcaccggaaacgaaaaaaaaggttctggcggttaaaggattgatgaaagcctatgcatcgcagcataaggtgttggataacatcaattttgaactccatgctggagaatttgtagcgattattggccgctcaggcgcaggaaaatcaacgttacttcatatattgaatggcaccatttcttccagcggtggagagattcttaactatcaggagagtggggaaacgcaaaatattgcctcgctgacggccaaacaaatgcgtaaatggcgtgccaagtgtggaatgatttttcaggatttctgtctggttcctcgcctcgatgttatgaccaatgtgttactcggaagattaagtcatacctcaacgcttaaatcattttttaaaatatttgccgagcgtgaccgagccagagccgtcgagctcttgcagtggttgaatatgttgccacatgcgttgcagcgcgccgaaaatttatccggagggcaaatgcaacgcgtggctatttgtcgcgcgatgatgcaaaaccctaaaattctattggccgatgagcctgtagcctccctcgacccaaaaaataccacccgaataatgaatacgctgcaaaaaatcagtgaaaacgatattgcggtggtggtgaacttacattcggtggcattagttaaagattactgcacgcgagtgattggtattgcgcaaggaaaaattatatttgacggtcatcctgatcaactaagtgacagtattattcatgatatttacaacgatgaagcaacagatgttttgcattaatttccattaatcctctacggacataggttattttaatgaaaaaagtaatgagtgttacttcgttagtggcaggtgcgatgatggtatttaacgccacggcggcagatgcaccgaaagaaatcaatttgggtattctcggtggccaaaatgcaacacagcagattggcgataatatgtgtgtaaaagaatttttggacaaagaattaaaagtaaaaaccaatttgcataatgcttcggattattctggggtcattcaaggattactcggtggaaagattgatatggtgctgagtatgtcaccgtcatctttcgcctcggtttatattaaagaccctaaggccgtcgatttggtcggtattgtcgtcgatgataccgatcagtctcgcggctatcactctgtggtcgtggtgaaggcagacagcccttaccagaaaatggaggatttaaaggggcaagcctttggttttgccgacccggattcaacttcgggtttcctgatccctaatcagagctttaaacagaaattcggcggaacgccggacaataaatataacaatttcttctccagcgtgacgttctccggtggtcatgagcaagacatccttggcgttattaatggtcagtttgccggcgcggtaacctgggcatcaatgatcggcgattataataccggttatactagcggagctttcactcgcatgattcgtatggatcatcccgatttaatgaaacagattaggattatctggcagtctccgttaattcctaatggcccaattcttgttcgcagtgctttaccgccagcattcaaagcgcagttggttgcggctatcaaaaaactggataaagaagaccatgcctgttttatcaaagcggtagggggcaagcagcatattgaggaaacctcattgagcgaataccaaaccgtcattgatttgaagcgcgatctaactaaaggcgaccgttaagtcggttgatataatgaataggatagctcaggaacggaataccggagctatcggttttcaggcggtaagttattttgaatactgatttcaatcattattaccagcaggttcgcagtaagcaaaaacgcgaaaccttaatatggtctttagctctggttgtactctatttgggtgcaggcagtattgctgaatttaatcttcacaccgttctagtttcattcccacattttttttgactatctggctgaaacaattcctgtacttcactggccggttttatttgccgatgggcgtaccgaaggttcattggcatattggggctatcgcctgaatattcagctaccgctaatttgggagacgctacagcttgccattgccgcaaccattctctcggttattgtcgcctgtattttggcttttctggcggctaataacacccacagcccagcaccagtcagattagcgattcgtacctttgttgcatttttacgtaccatgccagaattagcttgggcagtcatgtttgttatggcttttggtattggcgcgattcccggttttttggctctggcgttacatacgataggtagcctgaccaaattattctatgagtctattgaaactgcctcaaataaacctgttcgcggtttgacagcttgtggtgctagtaaattgcaacgtatgcgttttggtctttggccgcaggtgaaacctatctttctgtcttacagctttatgcgattggaaattaattttcgccagtcaaccatactgggtttggtcggcgcgggcggaataggacaagagctaatgacgtctattaagttggatcgttatgatcaggtcagcatcacgctgttgctgattattaccgtggtttcattactagattacgcctccggaaaattacgtaaacgtgttgtggaaggagccgcttaatgatgacgaatacgctttcgccagccgatgtgatttctctgaagcagcaacatccgacccttttctcgcagcagcggcgctatcttcgcttggtcgttggcatcggcgtggccattgttttctattatattttcttctttaatttctttggtattccctggtctgccttcgttcacggcagccagcaaatagggcgctatttcctgagaatgtttgtctggcatgattttatcaactggccgtttaaatattactttggtcagatttttattactttagccattgtattcgccggtacgcttacagcgacgtttattgcgttgccactgtcctttcttgctgcccgtaatgtcatggatacgccggtattacgagttacctcttttgttgtgcgccgttttctcgatgtttttcgcggtatcgatatggcgatttgggggctgatttttgttcgtgccgtaggaatggggccgttagcgggggttctggccatttttatgcaggatatgggcttactgggtaaactctatgctgagggacacgaggcagtcgataaatcccctagccgtggattaactgcaatgggggccaacccattacaaaaacaccgctttggtattttcacccagtcgtttccaacttttctggcgcttagcctgtatcagatagagtctaatacccgttctgcggcagtgttaggttttgtcggtgctggcggtatcggtttggtttacgcagagaatatgcgtttatggaactgggatgtggtgatgtttattacgttgattatggtggttattgtgatggtgatggataaaatatctgccatgttgcgcaataaatacattattggcgaagagattagcccgtataaatcagactcaagagatctgtgcgttatcactaacgataagtaatttctgtttttataccagagcccaatcaggcgcatttttgtgtggttgggttctgatatgttattttactaatcagttgtcaatttatatttgtttttgtttaacgtttatttgtgattttgaataatgtcgttattttgtatttaataattacttgcttttttcacgattatatcaaattaaatttacattgagaaaaaaggattatctctatataatactgcccgccagacgttaaagaagcttttttgttattcttgcgacattcgcacacgtctattaaattaattggaatagggcagtaatatgatcaacaacgatgtgctccgcagtgttcgctatatgcttaatgttaacgatgctaaaatcgtagaaatcatcaagttaactgattttgaagtgaacagcgcggatgtcgttaatttccttaagaaagaagacgaagctggttaccagaattgtcctgatgaggtcatggctcattttcttaacggtctgatcttctttaagcgtggtaaggatgacaaattcccagctccgtctattgaagcacgtatcactaataatattgtgctgaaaaagctgcgcgtagccttcgagttgaaagataccgatatgcacgatatcttcacctccgttgattttccggtgtccaaacctgaattgaacgcgttgttccgtaaggacgacagcaaaaacttccgtccttgtggcgatcaggtgctgcgttacttcctgaagggcctgactctgcgggtgcgcggtcctaaaaaatagtcgttttaatatgacataatgataatggcgggcattggttcgccgttattgtatttttcactttttcactttttcactttttcactttttcactgtttaaagaataaattaatgaatgatgaattaaatggattttttatgattattattatttctaatgcggatttttattaaacttcattaaatttgatattcgtataaacgaatgttatttgctttttttcattaactaaattaattacccctgaactgttaactaaaatgtattttgatggccataatgttgaagttgatatctgcccagactttgtttgaggcgtttgttatctatccaaatccgcagtggccggatattaatccggccatttagattattaataatcgtagaggttatctggggctaacttcaatggggagaaaatctgatgcaccccattcggcccaggaaccgtcatataaagatacagaacgagcttttattgcgtgtaaccccaatgccagtaccgcagcggttacgccggaaccacagctaacaacgatcggtttttccagatcgacaccgttagattggaaaatatcccgcagaatctctggcgatttgagctggccttgctcaatcatctggccccagggaatattgatgctgccgggaatatgccctaatcgcaggccggggcgaggttccggttccgcgccagcaaaccgtggcgtcgggcgcgcgtccaggatctgcgtgtccggttcgtctatagcggcgagaacctgctcgtaatttttaacagatttctcgtttagcgtggcggtaaaccactgtggagccggattggctggcccgctttccagtggcaaaccggcttgtttccactgttcaataccgccttccagcacgcgaacgtcacgggcgccaaaagtgcgaaatgtccaccagcctcgcggggctgagaaaaggttgccatcgtcatacaacactatcgtgtgctgatcgttgatacccaatttacccattgcttcaccgaatgcttcggcgctgggcaacatgtgaggcagatcggtactgtggtcggaaacctcatcaatattaaagaaaaccgcaccggggatatggccttgctcaaactcggcttgaatatcgcgtttagggtttagccccggcggtgacagccgggcatccagaataaccacttgtttatcgtctaaatgttcagccagccagtgcgggctaaccagaaaagaagggttcatcgaaagtcacctgtccgtgggttaatgaaaatatttagcttacaactatatatctaaattgggcacagaggcttttctctcgtcactatctttccctattgcgcgttggctcgaatttttcccgttcccttggtagggattaatacgggcttatcagtagcgccgcgggggatttgtggtgaatggctatactgtatggttaggcgagtatgcatgccagccgagcgaggttgaaattcacccgtttcacgaccttggggctgactacccatcatgatgatagctgggagaagtggctaagtttgcgtaggtttaatggatagccgctgaagattaaacgaacgactaaggcaaataaagtcgacatagttattgatttgttaatagttattgggtcataaagaaccctgtaactcattaaaatccttcgatgataagaggcaaaccgatggcactaacccttacccttagacctgttatagcactggcaaccatcatgttaagcctgacgactggtctggcacaggcggcagatagcgtgcgtgtggggtctaaaatcgatactgaaggctcactgctgggcaatattattgtgcaggttctggaggccaataatattaaaaccaccaacaaatctcagttgggtacgaccaaagtggtgcgagcggcgatcagcgcgggtgaaattgatatttatcctgaatataccggcaacggtgcctttttcttctcaaatgaaaaagatccggcgtggaaaaacgctcaggccggttacgagaaagtcaaagcgctggattatgaaaaaaataagctggtctggctggatgcagcgccggcaaacaatacttggaccattgcggttcgtcaggatttagccagtcaaaataatcttaagacgctggctgatttaggcaaatggataagcgatggtggtcagttcaaactggcggcttcggcagaatttattgaacgcccagatgcgttacctgcgtttgagcaggcgtatggcttcaaattaaatcaggaccaactgctgtcgctggcgggaggcgatacggctgtcaccattaaagcggcggcggagcaaacctccggtgtgaatgcggctatggcttacggcactgacggcccagtggccgctttgggcttacaaacgctgactgaccctaaaggcgttcaaccgatttatgccccggcgccgattatccgcgaagcgacgctgaagcagcatcctgaaatttctgccgtgttgaatccggtttttgcaactcttgatggctcaaccctgcaaaaactgaatgcgcggattgccgtcgaaggacaggatgcgaagaaggttgccgcgagctatctaaaagagaaagggtttatcaaaggttaatcctcgtaatgaaatactgaccggcgacggattgcatctttagccggtcatggagactttttgtttatgttagtcaaaaaccgcgtgctgctggcgctggtgacgttgctgattttggcaggtgccgggcttccttttctcagccacgcgcagaatcggttgatttcagggcagggtattgccttcttgtctttattacatgggcctgtggggttagtgctgttgcccgttatcgctttgattgccctttctttcgtttcccctaaaccttggatttacgcggttattgtcctgatggcggagttgctgctattcggtttggtctggttggcgggatttactgcctttcagctttccggtggcgaagagagcctggttcgcacttcgctgagcggcgctttctggctaatggccggattaacctttctgattgccgtcgatagcctttccagagcaattaccagcccgctgtggcgtatgttagccagcgtgcaggtactcgcccctgtgattattctgttgtttatcggtcagttggatcaactgtcgctgatgaaggaatatgccaaccgacaggacgtcttcgctgatgccttctggcagcacctcggaattttgttggcgacagttattcctaccgttttgctgggaatcccgcttgggatgctgtgctttcgttcttatcgcctgaaaaccgctattttttccgtgctaaatatcatccagacggtgccttctattgcgttatttggtttgctgatcgcgccgctggcggggttagccgcagcctggccgtggctggcaaagctgggagtgagcgggatcggtctggctccggcaattattgcattggtactttatgccttgctgccgttggttcgcagcgtggttgccggattggaaagcgtaccggatagcgtgatggaatcggcgcggggaatggggatgaccggtagccaactgtttgttcgggtgcaaatcccgctggcgttgccgttgattctatcgggcattcgcattgtggcagtgcaaaccgtcgggttagcggtggttgcagccctgattggtgccggtggattaggcgctatcgtgtttcagggattattaagcagcgcattggatttggtgttgctgggcgttataccggtgatagtgatggccatcgttgttgattcactgtttaaatttatggtttcttttctggatgtgacccgccgatgattcatttttatcaggttagtaaatattttgccggcaaactggcggtagataatctctcactggatattgccaaaggggagtttaccgtcttgatcggcacttctggctcgggtaagtccacgacgttaaaaatgattaaccggctgatcgagcacgatgaagggcaaattcactttgccggtgaagaaattcaaaaattcaaacccgaagatttgcgccgtcggatgggctacgcgattcaatctatcggcctgtttccgcattggacggtagagcaaaatatcggcaccgttccgcaactgcttaaatggccgcgtgagaaaatccgccagcgggtcacggagttattgaatctgttgcaactggatgcggatcagttccgccaccgttatcctcatgagctttcgggtgggcaacagcagcgggttggggttgccagagcgttggctgccgacccggaagtgctgttgatggatgaacctttcggcgcgctggatccggtgactcgctcagcgttacagtttgaaattgcccgtatacaccaaatgtcaggccgaaccatagtgctggtaacccatgatattgacgaagccttgaatctggccgatcgcattgtgctattggatcaggggaaagtggtgcagcaaggcacgccaattcaaatgttgacgcagccggctaacgattttgtgcgtgatttctttggccggagcgatttggggatcaaactgttggcacttggttgggcggcgcagcgtatgagggttggggaaagcgtggcgggagagccgattttggcgtcaaccagcctgcgggaagcgctttcgctgtttgtctcacgtaaagccgatagattgcaggtgatcgatgaattatcacagcctctcggcgtgctctatttttccgatctgatcgccagtcaggagcagccatgacctcatctatttgccgttggctatggcgtagagttaccgatccattggttttggcaatattactactgctgggattggtatttggcatgccatcgctgcatggcctatttgccgcctggttccccaatctcgatcgccctatttatttacaggatacgttctggtcgttattggaagctcacgtgttgctggtgctgatttccagcctgatcgccgtgttttttggcgttgcaacaggcattgccgttacgcgtccggcagggaaggaatttcgttcggttgtagaaacggtggtggcgatagggcaaaccttcccgccggtggcagtgctagcgatagcggtgccggtgatggggtttagcgagaaaccggcaattattgcgttggtactctatgggttgctgccgatactgcaaggcacgttgacagggctggaatccgtgtctcaggccacccgtgaagtcgctcaaggcgtaggtatgagtgccaggcagattttgtggcgcgtagaattgccgctcgccgctccggttatcgtcgcggggattcgcacatcggtgatcatcaatattgggactgccgcaattgcttctacggtcggtaccaaaaccttaggttctccaatcattatcggtttaagtggttttaatactgcttatgttattcagggcgctttggttgtcgcgctgttagctatcattaccgatatgttgtttgaacgttggacgcgaaaactcgcggcctggcgcgagttacaatcggtatctccgtcgaataacccgtaattcaggcttgttatcttcagcgatacacaggagtttttggtgatcttcttaattgtattcggagtgcatcaaagtgacgctttgccattctggctgtgttgacgcaggcattgaatcgctcaggcgtgcatcagcgggccgatagcatgctttagccagaagagctattggtacattggcggcatccggactgccactagtttgctcggtaaatatatctagcgggtaattaaccttaattagacagggaattaaagcggccctaactgagccagcagcgtgagagaggctattgctgctggattttcacgtcacctctttctctgaatatacactgattaacgatatgtgaattatcgcggtcagacagggcttggcgaatttataacataaacaaaaataattaattaacggtattaatttgcttacttattaactgtagtcagttaaataaaaatcgtgtctgaaatcattaatgtctaacaccagggttgactcaaatatgatttatatcaattcgcttgattataattaatttttaatatgtttatttatacagcgtcgtttcatttattagaagaaatacagccattccctataattaaattaattgaagataactgtaaattcatgtatttacaaatacatacaaaaatatacaaacatttttttataaattacgtttcatcttacatctgattttattggttatgctcgaattacattcatattctattaatcaatggcttggctggtttataaagtcaaaaatattaattaattgtgatgagtatgttttaattcgtaatattaagtaatttattgatttaattcaattggttgtagttgactgattttctggttgattgtctattttttattaatgtttttttacgatttagataatttacgaattttttacctacctaattggttgttgcgtcatgtttttttgatcaggattaaaatttccttagaaaatttattttctttctttataaattttatcgtctatctttaaatacgcatgcggttattactcattatttcatcccattcctaggggtttgtaaggattacctatgtctacagatgatcaaaaggtgggcctcattcctgtcaccttgatggtagcaggcaatataatgggctctggcgtttttcttttacctgctaacttggcttcaacgggcggaatagctatttggggatggttggtcactattattggtgcgctagcactttcgatggtttacgcaaaaatgtcatccttagatgatagtcccggtggttcctatgcctatgcacgtcgcgcatttgggccatttttagggtatcagaccaacgtactttattggttggcctgctggattgggaatattgctatggtggtaattggggtcggttacctcagttattttttcccaatcttaaaagaacctatggtattaaccatcacttgcgtagtgatcctgtggatatttgttgggctgaatatcgtcggtcctaaaatgattacgcgggttcaggctgttgccacctcattggcattaatcccaattgttggggttgcgctgtttggctggttctggttcaaaggcgagacctacatggaggcatggaacgtcagcggactagggactttcagcgcgattcaaagcactttaaacgtgactttgtggtcatttattggggtcgaaaccgcctctgtagccgctggggtagttaaaaatcctaaacgcaacgtacctattgctaccgtcggtggcgtattgatcgccgcggtatgttacgtcctgtccagtaccgccattatggggatgatcccgaacgccgcgctgcgtgtttctgcctcgcctttcggtgatgcggctcgtttagcattgggtgataccgcgggtgccgtggtttccctgtgtgctgcagccggttgtctaggctcactggggggctggacgctggtagccggtcaaaccgccaaagcggcggcggatgacggcctgttcccgccgattttcggtaaggtcaataaagccggtacgccggtagccgggttgcttattcttggcgtattaatgactatcttccaaatcagcagcatttcgccaaacgcggcgaaagagtttggtctggtctcttctgtttcggtcatattcactttggtgccttatatctatacctgtgcggccttgctactactggggcacgggcatttgggcaaacagatcaagacctatgtcgccattaccatggttgcgtttgtgtactgtatttgggctgtggtgggctccggtgcagaagaagtgatgtggtcatttgtggtgctgatggttatcactgcgctttatacatttaactataaccgtacccacaaaaacccgttcccgctggatgctccattggataaaagcaattaattcatcaccccgcgccgaaaggggcggggaagcataaatctgatgttttggtcttataacaaggacaactacgatgattgatttaagtcgtcacaaaaaacgcaacgttttggtggtggacagtaatattctcgaagccaataccgcgaatggacgagccgttaacgaactgattgaagccctgagggacattaatttcaatgttattgccgccgcgacctttgaagacggtatcgctacggtcgcttcagactcttctttgtgttgtatttttgttgattggacatccggtggcaatgacgatgcctcccacagccaggcttccgagctactaaaagaaattcgccgccgcaataaggatgtgccggtattactgatggcagagcattcttgtattaatagccttagcctggaaaccatgcgattggtgaatgaatttgtctggatgcatgaagataccgctgaatttattgccgctcgcgcccatgcgctgatcgtaaaatattatgaacagctgctgccgccgtttaccaaagcactctttaaatataccgaagataaccctgaatactcttgggccgctcccggacatcagggcggggtagcattcagtaaaacggctgtaggccgcgaattcctcgatttcttcggtgaaaacctgttccgtaccgatacgggtatcgaacgtgaatcattgggttcgctgctggatcacagcggcccgatcaaagattcagaagcttacgccgcccgcgttttcggggcgcatatgagctattccatgctgaacgggacctctggttctaaccgtgcgattatggcggcggtagtgggagataaagaagttgctctgtgtgaccgtaactgtcacaaatccatcgagcaaggattggtcatgaccggcgcgctgccggtgttctttattcctacacgtaaccgctacggtattatcgggccgattcccaagtctcaattcaagccggagtctatccagcaaaaaattgagcaaaacccattgaaatcacaggctaacagtacaaaaccagtctatgccgtagttactaactgtacctatgacggtatgtgctacaacgctaaacaggcgcaggatctgctggcggaaagtgttgatcagattcattttgatgaagcctggtatgcttatgcccgcttcaatccaatgtatcgggatcgccacgcgatgcgcggtaatccggcggatcacgatcccgacggtccaacggtgtttgcgacccaatcaacccataaactgttggcggcgctgtctcaggcttcttatatccacgtgcgtaacggtaagaaaccgattgagcattctcgttttaacgagtcttacatgctgcaatcgaccacttctccgctgtacgccattattgccgcgaacgaagttggcgcagcgatgatggacggcgagcaaggacacgctttgacgcaggaagtgattaacgaagcggtcgattttcgtctggcgctggccagagcccatgatactttcgctaagcaaggggaatggttcttcaagccgtggaacgcaccggaaattaccgatgctaaaacgggtaagaaagtgccgtttgcgcaggcatctcgcgagcagctggcaacggacccgtcttgttgggttttgaaaccgggggaaaactggcacggctttgatcaattggaagacgattggtgcatgttggacccaattaaagccggcattatggtgccgggcatgggtgacgacggcaaaatgctggacaaagggattccagcggcggtggtaacggcctacctcggtcagaaagggattgtcccttcacggaccaccgattttatggtgctgtgcctgttctcagtcggcgtaaccaaagggaaatggggaacgttaatcaacgtattactggaattcaaacagcactacgatgacaacacgccaattgccctgtgtctgccggatttggcgaaaaactacccgcagcaatatggaaaaatggggctgaaagacctgtgtgacgacatgttcgcccacatgaaaaccagcgaaatggataaattgcaatctgaagctttcagtaacttacctaaaccggttactttgccgcgtaaagcattccaggatcatatggcaggtcggtgtgaattgctgccgattgatcaattggcgggtcgtatttcagcggttggggttattccttaccctccgggcatccctatcatcatgccgggggaaagctttggttctaacgatgagccttggctgcgctatatccagagcatcgcggaatggggtgaaaaattcccaggtttcgagaaaattctggaaggctccgagcagaaagacggtaaatactctatttgggtactgaataaataatatttgggtactgaataagtcattaccgatcgtcaaaccgcagagagaattctgtttgtggtattaaagggcaaagagcgatggacgcgcactttgcccttttggcgtttaacggtctgacaaagttaagaaatatttatgattgacagggcgttataatttggacaaaggcaatgcagacgttgttaaggaactgaaagagtaactgagggttgatctgtctattcgctgtgcccccctccgctcgcaggtggttgaatgggggaggggctaacagtctttttacagcagcgatgcatgatgaatagagtagtgattaaggctgcttttgaccggcgttagacatcccggccggcgcgatgtcacccagcggagagtgtaccgtttcggtttcctgcggcgtggttgaacgggtatacatgttcagacccgccaggaatacgccgcccagagaactcagagccatcaccgcaaacagggcgatcagtaatttcttctgcatagttatattttcactttttatcgaaacagcaggaattatagacggttcccttagcgaaacaagggcgcggcttttaacgcttaccaattaaaaacttgcccaatgttatcaatacgaccgccgagacaataaccgccagtgccagccactcggttagagacagactctcgccggcaaatccgatgcccaacaatactgccaccaccgggttaacgtaggcatagctggtcgccaccgccggagggacgtttttcagcaggaacatataagcgctaatggccagcattgagccgaatacaatcaggtacatcaatgccagaattccgctggtggtcggcggttgcgtcagtttttctccgcttaaggttgagcccagcagtaatactacgccagcaactaacatttgagccgcgccagacatcgcgcctgcgggtaatgccagtttggaactccagatcgaaccaaaggcccagctcgccgaagccagtagaatcatcagcgcgccggtaggatttcccagtaaattgctgccagtattcagcaaaatgataccaaccagtcccagcccaatgccagcccactccagtttggtattcttcatgccccacagcatactaaaacacagggtaaatagcggaacggtggcgaccataaccgccgcgataccggaaggaacgtgctgatgttcagcaatagtcaccagcccgttaccaatggctaatagcaaaattccgatggcgctggccgccagccattggcgtggtgtgggtaactgatggccgcgaatagccagaaaactgaacagaataatccccgccaccagataacgaatcccggccatcatcaacggaggccagctttctacgccaatacgaatcaccagataggtagatccccagacgaaatacagcgtgaaaagcgcaccaattaacggccacgggttacggctagtttgctttagcatgattcttcaacaggtaaggacgggaaagagtggtttagtaaacatgatctggctgatgataagcaaaggattaaatctgttttttgccccattatctatggggataaactccccgcaatcaataggtctttatctatcgtatttttggcgtcaatggattgaggatatttggacacatttaaaccaatgaaaatttttttctgatatagcatgctgaataaatcagcattttcagttattggtttggagtcccgcttgagaatattgaacattcgagggtcagtgccaggtattctggggctggcgatgacttacgggttgctaagccatagcgcagccgccagcccaccctatgcatttttatctactgaagatctccagaagaatcggcagcttattactgagcagcaggcgccggaactcactcaagaagcgtattcccagctaattcgacaggcggataaggcgttagcgcgggaaaatatgagcgtgatggataaacgcatgacgccacccagcggttctaaacatgattatctcagtctgagcgcctattggtggccggacagccagcgccctgacggtttaccctgggttcgtcaggacggcgacattaatccggccagtaaaaatgaggacagcgacggcgttcggctggcggacttcaccgcgcaggtgcaggctctgacactagcctggtatttctccggtcagcaaaaatatgcggataaagctgtcgggatgatccgagcgtggtttttggtaccggctacgcggatgaacccaaatcttaattttgctcaaggcgttcccggcgtggcagaagggagaggttctggtgtgctggacggacgttatttcgctatccgagtcgtggattcgctgatcatgctgcgtaaaaatccgagctggacggcgcaggatgaacaacaaatgcatcagtggatgacggattatttatattggttgcaaaccagcccgttgggaaaaaaagaggcggcggctaaaaacaatcacggcagttggtacaaagtgcaggttgccggaattgcctggtatttgcagcgtgacgacttggtgttggacatggccgaacagatgaagccgctgctgaattatcagttggaagccaatggcgcacagccgttggagttggctcgaacgcgttctttccattatagcgactttaatttacaggcagtgacgcaactggctacgctggcgaacaacctgcatttggatttatggcgctaccaaacgcctaacggcagcgggttactgaaagcgctggattttatggcaccttatatcgataaaaacctagattggccttatcccacgcgggatcgctttggcattcggttgatacctttattgagtcaggcggacaaagcgttgggccaacctcgttatcagcattggatcgctctgggcagtttcagccccccgacaggaaaatctgtagccaaggctcgtggggcggtgaacggggctttacgagataactggctgctccaggctcccgagacgcgttaatgttgtgtatgaatgagattaacatataaaaaagccgggaattaatcccggcgaatgacctgaaaaatacttcatataaaatgagggtaatgctttacagaagacttagaactgataaaccaaaccgacggcaacgatatcgtcattattcagtttcagtttattgtcgttgctcaactggttaattttataatctacgtaagtagacatgtttttattgaagaagtaataagcgcctacatcaatatatttaaccaaatcgacatcgcctagaccttcaatatctttaccttttgactgaacataggccagagaaggtttcagaccgaaatcgaactgatattgagccactaattcaaagttttgtgctttatttgcaaagccgctcactgatgttggggtgttattaatactggccgtaccggaaattggcgtcatattacgggtttcggcataggttgccgccagataaacgccgttatcatcatatttcagccccgtggcgaaggcttcagctttatcgcctttaccgaatgtgccagccttctgagcggttgtgcggttggaggaggtatacgcggcaccgatgctaacgcctgatccaatttcatagctggacgccagaccaaagccgtcgccgttctgtttcgaagtcccgcgggaagtatcgtcgtttttgccttgatattgcaggctaaatttcagaccgtccaccagaccgaagaaatcgctgttacgataagtggcaacgccattggtgcggccagtcatgaagttatcggtttttacatagctgtcgccaccgaattccggcagcatatcggtccacgcgccgatatcgtataacacgccgtagttacggccatagtcgaaagaacccaatccggcgtagcgcaaaccggcaaagcctaagcgggttttggtatcggcggtgccttcgctttccgcgtggttaaccgcaacatgatattcccactgaccgtagccggaaagtttgtcattaatttgggtgacgcctttaaagccaaaacgaacgtaagatttatcaccatcattacttttactgtcagaaaaataatgcaaaccttttacttttccgtataagtcgagtttattgccgtctttattataaacttccgcagcgtgtgaagtagtggcaattaaaagcgccggtattaacattgccagaatattaattttcatgtttttgccctgttttcttcattgaaagatgccaatcatcaaagtttttgctgtattcaatatctgtctgaactttctcagcgcagaatttttaccgcatctgtgtgatgtatttatgacaaagtgaatttaaggatgagataataaaaaataattgataatcagcggtgaaggcgctgaattattctacgcattcgcggtcccgaataggctgacgtgagcggcgcactgtgggacaatagggcaacattcagtttagataagatatgcatggcgttatcccccgcagtaaaagatcaaatcagccagtggtataaggcccttgggcaacagattccggactttgtttctcgcgctccgcagcgtcaaatgatagctgaagtggcgaaaacgctggccggcgatgccggacgacatttggctatcgaagccccaaccggcgtggggaagaccttgtcgtacctgattcccggtattgcgatcggccgcgcggaaaccaagccgctggtggtgagcaccgctaacgtggcgctgcaggatcagatttacagcaaggatttgccgttactgaaaaaaattattcccgatttgaaatttaccggcgcatttgggcgcggacgctatgtttgcccgcgaaatctggccgccatgtgtaccgatgtctctggccagggcgatttatcgctgtttttgggcgatgagctggcgccagccaacggcgaggagcaggcaacctgcgtgggcctgtctaaagcgttgagcagccacgtttgggatgggctgcgcgatcatcatcaacaatctatcagcgattctctgtggggcaagctcagcactgataaagccaactgcttagggcgcaactgtcattattttcgtgaatgtccgttctatattgcgcgtaaagagatcgaaaccgccgatgtggtggtagccaaccatgctttggtcatggcggcgctggaaactgaatcggtattaccgaatccaaaagaattattattggtgctagatgaggggcatcacctgccagatgtggcgcgggatgcgttggagatcgaaggtgagatcaccgccgtttttgccaatatgcagttggatatgattgcccgcctggtggatcagtgcatggtgcaatatcggccgaaaaacccgcctaaactggctaattcggaacggttaaaagatcactgcgagcagatgcgggagctgattctgaacgtagaacaacaggttagccaattgcttcctacggatagtattcaagctacttatcgttttgaaatgggcatcctgccggaaagcctgacagaaagctgcgccaaattatttaagttaaccgatgcactacgcggtttagccgagtttgttcttaatgatttaaccgaacaaaccggtaagcacgatatcgtgcggctgcatcgggcgattttacagatgagccgtaccttcggttatctggaggcaatgaccaaactgtggcgtctggccgcaatggataaagcttcaaatgcgcctatttctaaatgggttacgcgggaatatcgcgaaaatcaaactcatctgtccttccactgcgtggggattcgcgtgagtgatcagttagataaaatgctgtggcgcaaagtcccccatgtcattgtgacgtcggctacgctgcgttccctcaacagctttgctcgcctacaggaactctctggtttgagcgaaaagaccggggatcgttttgtggcgctttcctccccgtttaaccacgttgagcagggcaagctggttattcccaaaatgcgcgtcgaaccgacgatggcgaacgaagcggagcatttggccgaaatggcgcagtatttccgagccgaacaggccagcggtcgccataaaggtatgttgattttgtttagcagccatcgggcgatgcaaacctttctgagccacatcaccgatctgcgtttaatgctgctggttcaaggtgatcagccgcgctaccggttggttgaagagcatcgtaaacgggtgacaaaaggcacgcccagcgtactcatcggtttgcaatccttcgcggaaggcctggatctgaaaggggagttactgacgcaggtgcatatccataagattgcatttccgccgattgatagcccggtgattttgacggaaggagaatggctgaaatcattaaaacgctatccgtttgaagtgcaaagtttacctagcgcttcatttaacctgattcagcaggtggggcgcttgatccgcagtaatgagtgccacggcgaaattgtcatttatgatcgccgtttactgaccaaaggctacggctcacgcttattggcggcgttgcccgttttccctattgaacagccggagatgccagaggcggtagcggtgcctattgcggcgaaaaaaacctcggttaaagcagcgactacgcgaaaaaaagcccctaaacgtcgccgcacggacgttacgttgggcagctaacgacgtggtgaaaaataagcgaatggcagtgagcaattcattgccatttttatttgtagccaggcatttcaaacggtttcacgcaattctctttcacctcaaaaaaatccgtggctaagattaaattagccgcaggtcagttaactcttatttgccaactcatacgagttaagtctgggcgtacctccggcagtggcgtagttcagcttccagcccattttaagggtctatccggcgtctgaggtaagcagcatgaaacaggttatggcagagtttatcggtactttctggttagttttggggggctgcggtagtgcggtgttggcggctatgtttccagtggcgggaatcggttttctgggcgtcgcattggcgtttggtttaaccgtcgtcactatggcttatgctttgggccacgtctccggcgggcattttaatccagcggtgtcgctggggctctgggtgggtgggcgattttccggcgcgcagttgattccctatattattgcgcaggttctggggggattagccggtgccacggtattgtatcttatcgccagtggtaaggccggattcgacgtcaccgcaggctttgccagcaatggttacggcgtgcgttctccggggggctacagtttgcaatcggtgttgattgccgaagtgattctgacaatggggtttgtgatggtgattatgggcgcgacggattcccgttcacccgccgcggcagcgccgttagccataggtttatgtttaaccttaatccatttgatctctattccggtggataatacctcggttaatccagcgcgaagtactggagtggccatttttgccggtggaattgccttacagcagctttgggtattctggttagcgccgctgataggcggtgctttgggcggtggcctttaccgtgcgttgtttagccctacggcgtcgaagacctgattctaattatccgctccccgcgacgccgattgggctgcgggggcgttttcctcgcgcggccagcaacaaaatctccaaagttttaccgcttatccaaccccacaggccgccatgattgatacctgacagtaaaatggccagcacgctaatcagcaatagtagacagataatatccaatctctgctggcctgtatcaaggagcaattcgcatactttgccccgacagccggcaaagctcagtaaaatcagcgctaaattgagtaaaaatacccaacgccagcctaaggtgctaacccgtattctgcccaccaccggcccaatcgcccatcccggctcgtttacgcccaacaaagtgcctatctctggtgcgggcttgtttcgggaaaggcggccatcaggctgaccgttacgtataaagtacaacccagattgctcactgtaataagcgaaagagattcatcatccaaatgctatcggccaggccagcgcttggtaatgataagccaaacagcggcatccccagataaagtatccgatagcgagcgtagcgacccgcggtgaccataaaagcgcagagtgccatcaggaacaataaaacgcctcactgtaggttttccgtgctggcggaaaatgcctgttgaatggcgggaaccgcggtattgacgatagtcaaatcgatacaacctaaagaactggccagactgataccggtcagcatgagagcctattgtcgacgggtcagaggtaaatccgaagtgagcgctgaggacataggcataatccgggaagaagaaaccctcacggtgtagtggctagttaagtgactcagttgcgccattttttctttttatagcggaattaaattctccaatggggtatcaatcagtacagatttatttaagatgggtgatattcattgggctttgataaggagaaagtgatgatttccggcgatcgtttgcacggcatacgagcttttgtccaggcggcgcaggctggcagttttagccgtgctgcagaacagcttggtttatcccgctcagcggtgggtaaagcagtggcgcggctagaatcccgcctgtcggtgcgtttgtttcagcgcaccactcgtagcctctctctcaccgacgaagggcagattttctatgaggattgcgtaaaagcgctggatgcgctggacgccgcagagattcagttggcggcgcgagccgtggctcccagcgggcgcttgcgcgtgtcattgccgatattgttcggccagcagtgggtgatgtcgccgttgctcgaattagccgacagttttcccgcgctacagctggaaattttgttttccaatcgcacagtggattttgcggaggaaggcgtcgatctggctgtgcgtattgggcatattggtgatgttgccgggttggcggcgcgaaaactgggagaacaacagtgggtgttgtgcgccagtgctgattacttagctacctatggtcatcccacttccatttcggatttagcgcatcatcgcacgattagtttgttacgaaatggtcgcagccaaacgtggcgtttagtgaatgacgcaggcaaaaccgaatctataacgccagccagtcgtttacgattggataatatggcggcggtagccacggctgcggaagcggggcacggtatcgcactactgccgcgctggctcgtcaaccctgcgctgcaaagcggtcgattgatggaaaccttgccaggcaacactggcgccggttcaccgattaatattgtctggctaaaagggcaggtgatgcccgcgcggattcgggcggcgattgataggctggtggaggcatttacaccgcaggctccctgggagtaagtgagccggttttagccggatcaaacctgagttatgctaaacaaaatagcgagaggaagcctttgttgatggattaccgcaaaattatcaaagaagtaggacgtggcaaaaatcacgcccgcgatttggatcagcagacagcctgtgagctttatcaacgaatgctggcggggcaggtgcctgaactggagctggggggcattctgattgcttttcgtatcaaaggggaatcggaggaggaaatcctcggtttttatcaggctatgcaacagcaagtgatggcgctacaggctcctgaaggtcggccaatgccggtggtgatccccagctataacggtgcgcgtaaacaggctaatttgacaccgcttctggcgttactgttgtcgcgtttagggctgccggtggtcgtacacggcgtgaccgaagatagcactcgcgtgaccagcgctgagatttttcaggcgctaggcatgccttggtctgagacaaaagaagatgctcaaactcggttggataacggccagccggtatttattccggtatctgcattttccccagagttagattgtcagctacaaatgcgctggcgtatgggggtgcgtaatagcagccataccttggcaaaactggcgacgccatttctgcatcagcgagcgctgcgtttggccagcgtttcgcatccagaatatatgcaaaaggtcggtcgattctttcaggctattggcgcgccggcgttgctgctacagggaactgaaggggaagtttacgctaatccgctgcgctgcccaccgctccacgcgatcgttggcggtgagcaaagagtcttgctggagcgtgcagaagaaagcggcgtgcctgatctacctgtatccaaagatgcagcagaaactgcccgctggattgaacgctgtctggctggcgaggtgctggttccgttgtcgatcctcaagcagttagcctgctgtcaggttattgccgggcaggcaatatcggtagagcaggcattgcggcaatttgctgctaaataatccggttttcacagaataaactgcgcggtttccgccagtcttggtcctgattggcttcccgctggcatcaggtcggtgagggcttttagcgtgataaccctatcaatgatggaaggaatcctatgcaacaggctttgagttatttcaacgcgttgaatcaagattatctggcagtgcatcaggccaaagaagacctgttttggcagaattacatgggtttgggggatgccgacgttgggaagcaattctcggcggcggagacggcatacaaaaggtttattgcggaaagtcgccgtttaaaagagctgcgtgagctgattacggcattagaagcccagccaaaaacgccggaaaatcaggatttgcttcacgggctgcggggctggtatcgcttttttgactgtaatgccattgaagatcctcaggcgcaggctttgctagatgaaattattgccttcgagtccgatctttatcagcggcgcaaaactcaccagccaatgcattttaatgctaaaggtgaaaaagtcgcggcttccctgggcgagttgctgaccaatcaggctactaatgaaaatgaaacttaccgacaaagttctcagcaggcgctgcgcgaagtagagcaatggctgttgcacaacggcttgcctgagttgattatcttgcgtaaccgatttgctcgccagatggggtatcgtaactattttgactataaagttaataaaaccgaacagatgatgccggaacaactgtttgccattctggatacttttgaacagcaaactcgtgaagcgaaccgccgtagcctgcaacaactggcggaaaaacaaggggagtctgcattagaagcttggaatatccgttttgccagcgctggagacgtcactcgtcagctcgatccttattttccttttgccgaatcattagatcgctggatcaacagttttaagcgcctgcacattggttttcgcggcgcggagatgaatttggatttactggttcgcgctggaaaatatgaaaatggttttatgcatggcccggtgccgccatttgttcagcagggtaaatggataccggcgcggatcaattttaccagtttggcgaaacccgatcaggtgggaagtggagcttcaggtttgaatacgctgttccatgaaggcggccacgcggcgcattttgctaatattgtgcaaaatgcgccttgtttctcgcaggaatttccaccgacctcaatggcttatgcagaaactcagtcgatgttctgcgatagcctgctggacgatgcggattggttaaaacgttacgctaaaaatgctgccggtgaaccgctgccagatgaattgattcgcgacaatattgaatccaagcaaccgatgcgcgcattcaatgagcgtcatattttactggtgccttactttgagtgggctttgtatcaatgggatgacgtgcagctaacgccgcaggcaattacccagctggcgcgagatattgagcaaaagattctgggtattaacgccagcccaaggccaacgctggcgattcctcatttattatcaatggaatcggcctgctcctatcagggttatctattggcgttgatggcggtagagcaaacgcgtgccttcttcctgcaacgtgacggctatttaaccgataacccggcaattggctcggatctggcggaacattactggcgtcccggtaatagcgttagccatgatgaaaccttacggagtttgactggcgaaggatttaatcctgcttatctggcggcggcctgcaatcaaacggttgagcaagcgtgggcagccgcgcaggacgctattgccagcgcggcgcagcggccacagccagcggctgattttgatctgaatgtcagtattcgagtggtcgatggtgaacgtgtgctggctgataatcagcatggggacgaagcgatgtgtcgcgctttcgccaatgctattaatgccttgtaatcaacagaatagatcgaaaaatgcccatcagggggtgctgatggacattttcgaacggctgaggaatattagtgataaatcactgcggtgccgtgcatcaggttgttaccggttgcagaagtaatggtgaaggctttagcgccagcagcatcagctttttcagctaactgtgctttcaggctgctcaggtcagttgcgccgctaacggaaatgacgcctgctttctggtactgagccgcgtcctgtctattaacgtgttcagcggcaacgctggcaaatgaaagggtagttagagcgagaactgcaacaaagtttttgatgtttttcatgatgtaatcctatccgatttcgttagagtgaaagggcgtttcctttcgatagaagctatgttacgcctctgtgatatttatgaaaccggatagaattgagaatctaattcaatttttatgaacaaaaactaacgtgcggcgaccccctgcggacgcagcatatcaaagcgctgctcttcggtgacgccataataagcactcggcccgcctcctcgcagaataggctgcgccgccgtggtcagataggtgccgttactgtctagcaattgacgattaatatgcaccgcaatcacttctcctagcaccagccagctattggtattgctgccgtcggcggcctttaactgaatgcattgcgtgagtttacattcaaagttcaccggactttccgcgacgcgatctacggcgattaaccggctgggttgcggcgttaaaccggcaaactggaattcatcctgctcccgcgagagcggggcggagctgttattcatcgcctctgctaactggcgggtggccagattccagacgaactcgccggtttccacaatattagccacgctgtctttccaaccgttgctggaaaaaccgatgataggtggcgtatagctaaagcagttaaaaaagctgtaaggagccagattacgctggcctttggcgctaacagaggaaatccagccgataggtcgtgggccgataatggcgtttaatgggtcgtggggcaggccgtggccgctggcgggctcataatagtaatcgtcttcggtactcataacatccctacatcaggtttatcataagaagtcagcttagtggctaaacggaatttcgcgcactctcgctggaaaattaacaggttattggcggcctgttttgtcactcgcccgttttaaggcgatttatgctatcttacgcgccagaaaatgcctatcagagactgaagacgatggaaaacaaaaaaaatctttcccaaagaaaaaagcggattacatccccgaaatcgccatcgttcccgctacgattttgatgcgctttcagccagttgccctgaattaagcgcatttttggctccgaacgcttacggtgatatttccgtggattttgccgatcccgcggcggtaaaaatgttaaaccgggcgctgttaaaacatttctacggcattgaattctgggatattcctgcagattatctttgcccaccgattccagggcgtgcagattatctgcatcatttggccgatttgttggctagctgcaatggcggcgtgattcctcaggggaaaagcgtggcggtattagatgtcggcgtgggggccaactgtatttatccaattatcggtcagcgtgagtacggctggcgctttaccggtacggaaatcgatccgcatgcgctgaacgcggcgaaaatggtggtatcgatgaacccgaccctgagaaatacgctacgtctgaaattgcaaaagcagcctcaagctatcttcgaaggcgtttgggcagttaacgaacgttatgacgtcaccctgtgtaaccctccgttccacggttctgcggaagaagctgcggcgacaactcgccgtaaattgcacaaattgggcaaaggtgaagtggcggctaagccggtgcagaactttggcggcaagaatagcgaactgtggtgcgagggcggcgaagagggttttgtcactcgcatggtgcaagaaagcgtcgcgaggggcaataattgcctgtggttcacttcattggtatcgaaaaaaaccagcctaccagcgatttatcacgctttacgctacgctaaggcggtagaggttcgcactattgatatggcgcaagggcaaaaagtcagccgttttgtggcctggacatttcagactgaagagcaacaggcggcctgggtggctgaacgctggtaacgtagcctgctattcggttgaatataattggttgaaagtattgattaaaagtattaaatcaactcttggctcggcggcaacggtagcgttatctgccaaatgttgtcgggccctattttatttctgcgatctcccactttttgctttattcacccgcctttccagccatttcatcaaaagtaatcacagtctttatccggttattgtgtcgagcagttaacaatatcattactttgttctacgcttagaggataaatacccgacgggcaatatagcctgctaataatcatacaaattacaaaatttttcgttgtgactttctctgattttacagcaatgtctcattctcccagggtgaagactaaagcctgcggaggacatttttaatgttcttcgggctttggcatgttttttgtaaaaaggcatgttgataaagataaggcctcggcttattcattattcgccataaggactctcagctatgttcttaaatttacgatcttctcatgcgccctggcgttccgaattaacctcgatagatagcgcagtaccgatgattatatttaagccagatgggacggtaatacaggcaaatcagttatttctacaggcaatgggatatcagcgtgaagagataataggcaagcatcatcgaatattttgcgatcccaattatgtcgcaagcgaagcctatcaacgccactggcagatattaaatcagggaaagccgatcaccgataatattaaacgtattcgcaaagatggctcggtggtctggttgcaggggacttacacgccagtgctggataggctggggaaagtggtggagataatcaagattgccagcgatgtcaccgagcgaattttacagtctcaagagcaccaaagtctgctaaaagccctaaatcgttcaatgggcatgataactttcacgcccgcaggcattattctggatgccaacgataatctattaaatatcatcggttactctcttcgggatattcagcataaaccccatcagattctctgtaagcctgagtttgcccatagcgacgaatatcgccagcattggcagcgtttggcgcgtggcgaatttattgtcggccgctttgaacgtatgaatagccgtggagaagatgtctggctggaggccagctataacccgattatggatcacgatgggcaggtgataaaggtggttaaaattgctcaggatattactcaactgattcaacagcagcagcatgaagaagcgctgatgcgcaacgtacatcatctttcagtcaataccgataagtcagcgtccgaaggggcaaatattgtccagcaggcggtaaaaggcatgctggaagtggaatccattgcccgcgaaacttcggacgtagtcagcgacttagggcgctgttccaaggagatcggcaccattgtagagtccattcgtaagatatcctctcaaactaatttgctggcgattaatgcttccattgaggctgcccatgcgggagagcatggcaaaggattttccgtggtggccagtgaggtgcgtttgctagcggatcaatctcgtcaagctgccactgaaatcgaacatatgaccaaaacgattcagaacggagtgaccgcggcgattaaaggtatgggaacctgcgtggaacaagctggcggcggcgtggcgctcactcaggatgcgggggaagtgattaatcaggtcaatattggtatgcaggatgtggtgaagctgatggcggcgttcgcgcagataaaaaaccggcaaagttatagcggtagttaattgagaaaaattaatagcgtaaacgttaatgcgataaacggggataagaaatcgtgaaatacccagcgggagccagtagccgcccgctgggtagggttatcaggaaacgtgctgcaagaactcacgtagcctgtcgcttggcggattggagatcaacgtatcaggatcgccatcctcagccacgcggcctttatcaataaagatcaggcgtgaggccactttctgtgcaaagcccacttcgtgggtgacgatgaccatggtcatgccttcttcggccaaatctttcattacggtcaacacttcatgacgtaattccggatccagtgccgaggttggctcatcaaacagcatcagtttgggcttaaccgccagcgcgcgggcgatagccacacgctgttgctggccgccagacagttcggctgggtaatggtgcgccctctcggacaaccctacttttgccaacagggctcgcgcctgtttttctgcttcagccttactggctccacgcacccgaatcgggccaaaagccacgttttccagcgcggttaagtgagggaacagataaaactgctggaacaccattccggcttcctgacgaatcagacgctcatcgactttggggtcgttaacatccaaaccatcgacaatcagttggccttttgtgatgacttccagcttgttgatgcagcgcagcaacgtggatttacctgagcctgatggcccgataatcaccaccacttctcccttggtgatattcaaattgatatcgtgcagcacctgggtttggccaaagtgtttggagacattcttgaattcaatcatattattttcagttttctttctaaccgacgcaggacgaagctcagcgccagcgtgataatcaggtaaatcaccgcaacagccgtccagatttccatggcgcggaagttaccggcgataatctcctgaccctggcgagtcagttcggctacaccgatcacgataaacagtgaggtgtccttgatgctaacaatccattggttgcccagcggtggcaacatgcgacgcaatgccagaggggcaataacgtaacgcagggtatcgcgtttggataaacccagagccaaaccggcttcacggaaaccattgtggattgacagcactgcaccgcgggtaatttccgcgatataggcgccggagttgataatgatggtgactaccgccgccgagaaaggatcgatgcgtaccggcatcatcattggcaaagcaaaatagataaacatcacctgtacaacgataggtgtaccgcgaatcaactcaataaaaactaatgcaatatttctacttaaccaaccaccgtaagcacgggcaaaaccggctacaaccccaattatcaggccgccaagtaaacccaggaccgagatccatagggttaacttagcgccttcaagcaggattggtatggcgggccaaatagcgctccattcaaactgcatggatattctcctggtctaaaaacggcaaaaattaattacttaggttcaacaccaaaccattttttatagatttcgttgtaagtgccgttctctttcaatgttttcagtgcagcatttaccttcacgcgcaattcgctgccctgtgggaaggcgataccgtattgctgagctttgatggaatcacccaccgctttaaactggccattgccggcagttttaatgaaataaaggatgtttggcgtgtcatgcaaaactgcatccgcgcggccagtacctaattccaggtaggcgttgtcaatgttagggaactgacgcagatctttggttttgatgttggctttcgcgtaatcaacagagccggtgccgcttttcactgcaacaactttgcctttcaggtcggcttcgcctttgatgtcattattggtggtttttaccatgaccagcaggccactgttgtaataaccatcagagaaatcaacggcttttttgcgctcgtccgtaatggtgataccggctagtgccaaatcaacgttcttggtttgcaaagcaggaatgatgccgctgaaatccatgggtttcagctcataatccagattcagctctttggcaatggcggcccaaaggtcaacatcaaaaccaacgtatttatccccttgtttaaattcgaaaggaacgaaagcggtatccgtggcaacaatcagtttgtccgctgcgtgagaacttattgcaaaggccagagtgattgcggccaatgaaacttttacaagtgacttcatatgtgggagttcctttgtactttgagtggaggagatccgtttttttataattcagggagcaatatgaaaagatcgtgccaaaattgcaagtcttttaaaaataaagcaattaatctaaataattaggttgcaactacttagttactgtattttgcactgctatgggtcaccacaatggtgcgtttttaccattttggtgcaatctctccatgagtaacccatcagtaactaattagtcaataattaatgattatagtttaacagttaaataacaaaatgcgggtgagttcaggttttttatacgcaaaaaataatgatcgacatttattgatgatagaaataacgaagggttaaacagtcggtataagcgagtgagtatgagagagtataagagaagaaagagaagttagcgtaactggctgtctttactgccccggcggttatagccagcgtgatcagcctgttgtttatcgaggattttttgacaattgatacaatatcgaacgccggttagcgcttttctacgcgcctcaggaattttttcaccacattccaggcagtaacaagcactctcgcccttacccagcgcctgacgtgcccgctgaaccgcatcgtcaacggtggaatcaatctggtcttgcactgcgccgtctccggcccatccgcttgccatcgtcagtgtcctccgaaaagcataagggccagctaagccgaccctccatagtatttcatctaacaattattaattaaattattcgatattggcttcgataaaccacaggaactgatccagatcgcgagaggcggcggtaaacatatccgcagtgtcttcgtcttcgacctgagtaatcgccttacgaatatcattcgctaccaccgcatagcggtcggccagcgctttcagatgctcttgcacgctatgaatattagtcggatagcttttcaacggtgatttatcgttgacgacttggacggttcccagcgctacgccaccgagttgcaccgcgcgctctgcaaaggtatccaggtgcccggtaatggcggtacggaagccatccagcatttcatgaacggcaataaaattggcgccgcgcatgttccagtgagcctgtttggtgatcaatgacagatcgataaattgaatcagcatgtggttcagcgctttgattgcgccaatttttacgctttcatccaaatcattacgggtgtaaagcaggtcagaagatttcgtttttaccagtttagcggtactcataataggtatcctcatgctgtattggttattaatttctttaccggatcaagtatagcagggttatataatttcgttgctccaatacggcctatcaattaaattggttataacgtcagataattagtcatagaccatgattgaataagtttttggtaacgttatgatttaaaataaattagctgaagcatttattcatctgtgctcacgggcctatttgtttttggataaattcagttatttaacctgcgcgaaacaataagatgtccatatttacatgactgcggcctttaattcctgctcactaagataaagataattatttatgaaataaagctattgtaataataggctcaaacaaggggtaattgagaggttttctgggttataaatcagagcaatatacgggctgatattcatcgggagtaagcaaatgaatacctcgctgatagcggcagggttattctatctgcaaggaagaaaaacacttcaggccgtttgagcgatgataaacaggcgagggaaagccagcagcaggttgccattgctgtgtaccggataggccgccgtgatttttagcagataagcttgcaagaaatcttgccgatcggtttcattcaaagggtcaataaaaggacgtaagccggtggatcgtacccagtcaacgatcgcctgagccgaaggcatcgggtggaaatagcgagttcgccagatatccacgcgttgagcaagaggagccagcagatcgtaatattcgctggcagacaaaattttaacgcgttcagcgttacttgccgctaattgttgttgccagcggccttcagcggcgacttctcgcatggcacagtggctgtgttcgtcacggttatcgggcatttggattgccagaataccctgcggggccaaatggctcatcaattgaggaatcaaaaggcgatgattttctaaccattgcagggaggcgttggcgtaaatcacattttgcggctgaggaggttgccaatgctgaatgtccgcaggttgaaatttacagtctggcagccgcttttgcgcgctttccagcattgcttgagaattatcgattcccaccagatgggcgtgaggaaaacgctggcgcagtaattcggtggaattacccggcccacagcctaaatcgctgacaaaatcgggcgtattgattgccacgcgagccagtaaatctgtcgccggtcgggtgcgctccgcttcaaactggcggtacaaatcaggattccagtctttcatcctaaaacctcattgttgctggctgaagagctaagcgccgacattaaatattttgtaatggcccgctgtacagtaccgctccggtaggttgcccggttggagaaccgccgtgaggttccagactgattgccatcacgttgcctttggttaacgcaactttattgaaagcgacctgtgtcggcccgctagcatttaacaagccgagagagtgaggtttttcgcctgccgcaatactccacagttcaaggctatgctgctcgccgatcggtactgtgcttaatggagttaacgtcaggctgcgggtagatttatccatgctgacaatccattggccgctttgctcgctgctggccagaaccgccaccggaatgggggcctcaggctgcaccagcaggcgggggaccagcaagagtgcagctaaacagactgcgatcgcccagccgagatatgcgccacttgcgcggcgtattgaggaagtctctgctttttcggggggaggcaattggagctggagttttttccaaatccaggccggcggtgtcacgggctgtaagctattgtccatttggctaaacaggttttgccagcgagacacttcttctgccagttcgggattccgtaggatttgtcgctcaaattgaattcgagccagcccgcgcagagtgcccagcgcatattctgcggccagtgctgattgatattcgcgtctgtttttcatattcctacgcagctctttaagtgctccagcgcgcggcggatccagcttttcaccgtgccaagaggctgttgtaagtgttctgagacctcgctgtgagaaagtccctgataataagccagcataatactttgccgctgttcagcggggagatatgccatgcaatgctccaaccgcttggcttcggaactttgctgtagctgagagaccggcgagggcgcgtcatcagctaggttatcggcctcgtcttcatcccatccctgcaaacggttatcattaccgcgcatcaaatctattgcccgattacggacaatatgtgtgagccaggtaaggggagaactgaggctgggattgtaattaatcgcctgactgagcacggtaataaagcaatcgtgcaatacctcttcggctcgggcatggttacgtaacatacgtaaggcaacggcgaaaagacgtggggaagttaaccggtataatcgttcaaatgccgcttggtcgcctttgccaatcgcttccagcagttcaatttgttcagccaaagacgcttcattcatttgtaatccctaaaagcaaggtgcagtgagacactgcacccagtatagaccgcttttatttaggcattagaactgtgtcaatgacatctatcacaccatttttctgattcacatcataagtgctgatattggccagattgcctttggcatctttaatctggatattatgaggcccattattcataaaccacagaggctgaccgttgacggttttcagctcggcggtaccgccaccctctttaatttttttctcaagctgtttcatatcatatttgccggctaccacgtgataagtcagaatttgggtcagcacggctttattttccggtttgaccagattctcaacggttccggctggtaatttagcaaacgcagcatcggttggcgcaaacacggtaaagggtcctgtaccttgtagggtatccaccagaccggcagctttaacggcggccaccaaagttgtgtgatctttagaattcacggcattctcaataatgtttttactcgggagcattgcggctccccccaccatcacggtgtcggacatcgctgctgccatagatacactgctgaatactaaagaggcacagatcgcggtacggataagcgttttcataatgttaatccttattagtatggaagaggtgagtcttgcctcacatctacctatacgaatcagcctgccgttttggatgccaaaagaagtgaatataattaataaaaaacgctagtccttataaaacaaggcatagcgtgatgaataagtcttgcctaaacggtgttaaatctgagcggttggcaccggatgcagaaaacggtgcatgatgtaagcatctacgtaaccctgtttcgggtgtttaaacgcctgcggcagggttgcaataatgccgaagcccagtttttgccaaaggctgaccgccagagtattggtgctgacgacaaaattgaactgaattgcccggtaacctaggcgctgagcttgttcaatgcagtgcagccccagctgtttgccaatgcctaaacctctgacgctggcatcgaccataaaagaggcgttggcaacgtgacaacctaatcctcgttggttatcaatcagcttatacatcccgacgattttatcttcatgcagcgcgacccagcagcgcacgccgtcaccaaaccaatattcgtaagcgacccgttctggcgtgtctgcggtgaaaacgtaggtgtcttcactggcgataaccgcctgaaaaagtggccagattgcggtgaaatcttcaggtgttgccggtcttatttccatgccatcgctctcatattgattaagtcagttcttcaatcttgggtttggctttaatcgttaaagttgcaccaatagaggcggcaataatacagcccagcgctgaccattgtatcaatgtcagatattcattcaggaaaattaggccagaaacggctgccaaagctggttccagactcattaatgtgccgaaggtacgggccggaagtcgggttaacgccaccatttccagtgagtaaggcaaggcggtagagagaatggcgacggccagagcaataggcaaaatagcgggagaaaacagcgccataccgttataggctacgccaatcgggcagaaaaccagcgcggcgatcagggaaccaatagctacggtacccggcccgtggttgcccccagctttttggccggaaataatataaatcgcccagcaggcaccggcgcccaaggcgcaggcggcaccgaacagatcgatactgtctacgcttttgcccagcggcagtaagaaggctaaacctattacggccaacccaacccacagaaaatcgatggggcggcgggaagaaaacatggcaacggccagcgggccggtgaattcaagagccacggcaatacccaacggaacagttttcaaagacaggtagaacagaaaattcattccgccgagcgccaggccgtaaaccagcaacggcatgcggctaccggctgtaaagcgcatccgccagggcttaaaaatcacaaatagaataagcgtaccaatccccagccgtagggaggtaatgccctgcgcgccgactagcgggaatagactttttgccaatgaagcgccgctctggatcgagatcatggctataaccagcaggaaaacgggcagcagggggagcgataatttggactgagaggacagcgacatccgttagagcctcggaaaaagagtgaataatcagatttttgccagtgtaaatgaaatgctgccgatgtatctaataattcgcaaaagtagcggatcagagacgggaaaaaagagaaataatttaatcttgagtgttttttatgcgttttgcggctatcttttagacggcaaactaagaattgtctggaatagcgttaagtgaggaacttcacaatttcgacaaaaattcgggaaaaggcgtatacttttagcgagttacactgttcttgaaatgatttgttacaccatataaaagtttagacaacgattcaggtgcagagtttctacctaagttttgttatattttaatggtgtttttgtttaattgaaaataatttgcgtcttgaggtggttatgaaaaaaattgcatgtctttcagcagtagcagcttgtgtattggcagtgagcgcaggtagtgcatttgcaggccagagtaccgttactggcggttacgctcagagcgattaccaaggtgttgctaacaaggcttcaggtttcaacctgaaataccgctacgagtggtccgattcccaactgggcgctatcggttctttcactcacactgaaaaaagttctttcggtgacagcagcagcgtttacaacaaagcacagtacaacgcaatcactgcgggtcctgcttaccgtatcaacgattgggctagcgtttatggcgtagttggtgtgggctatggtcgtttcactgcaaacggcgcgggtaacccagaagctaaatcgggttcaagcgattacggcgtagcatacggtgctggtgttcaattgaacccaatgcagaacgtagcgctggacttctcttacgagcagagccgcatccgtagcgttgacgttggtacctggatcgctggcgttggttacactttctaagagtaatcagccggtttagtattggttcttacgaactaaatgcgaaatccaataaaaatccgcctttgggcggattttttatgctccgagtattatcagatacaaaattatgcagatagcagcctttatggaagcgcattttccaatttatagctagataattatttttttggtaaatattaaaatttatttatactgtttaattcttgtaaagaaagaattaaccatttttattcaacggatatattccctcgccctaagtaaaagtatttaattatattaattacaaaaagttgactgatattaattgttggaacgcagacgttctggtctgacaaggttattcattattgatgtgaataaataattacattatcattttccatgtcatttaattaatcacatggaatcgttaatgaaaggaatcggagcgttattactcagcttattattaaccggatgtggcgggacttggttcccggaaggccattatagtgaatctcgtgaaccgaaatttcgacttcacggtgatgagcgcacaggtgcagaacgtatggcggattgtcatcgcactaagagctgtcgcggtgatgagtggcgccaacctaacccggattatgtcggccttagcgtgacttactgataaacctgcgtcatctagtctcattgaatatcattaatgatggataatattttagtcaccgttattgatattcaacgttaaccatcccgcgttcttgccgtgcttaaataagactgactacgctgtgttatatggaaattttcaaattaatttacgatgtggaatgcgtaaatcgaccgcaccaattcaacagattttgcgatattcaatatagcgaagctgttcgcgcttctgccagtgggtttatattctagccgtttaccctggcatttctctcaattaaaaccaccttcgccgagtgacattatccggagccagtgacgctgactccgggagattgaataacttaataattgctggcagcttcttctattagtgcgatgatttcattgggatgagaggctagagacgcatggctggagtccagccgaatggtttttttcggtttcatgcgttcggtaaaccattgttgggtttccggcggaatcatatggtcctgattggatatttgataccagcttggcttagtcttccacgcgggttccgttgaagtgtcggagaagcattttcctgaggtcggcttttgtgcagcagccatgacaacggcttcggttttgtccaaatcctgacagaaactttcatggaacttatcgtattttatccataaaaagtcgtcctgatccggaaacagattagcggctccggaaggtaaatcgcgcagttggaaaatactgccgagactttcgcctttatccggtgcaaaagcggcgacgtaaaccagtcctactagattaggtaaatgtccaagctgagaaataaccatgccaccgtaggagtgaccgaccagaatggtcgggccctggagcgaggtggccaatttttcggtgcgttccacatcgtcggccagagaggtcagcgggttttgtaccgcgtacaccggatagcctttattatgtaaagtcggaataatatgacgccagtgcgaaccatcgccccaggcaccgtgtaccaacaagatattcggttttgtcgtcatgttgtgtcccattatcagagtgcactataaagtatgataatccgcggccccttgccgcaataccacacatccatcaaaagtatagtttagatatgtgactaattgatgaggcagggcaaactcgcgcatcggttttagcaatctcataactcaataaattcgacttacgagcatttaaaatcaaacgactagcattgaaaacccagtcgaaagataaataataataattataaaacaataatttaacctgtgggttaattcttaatttaattatcttattgatttgtaattattcaatgttgtgacaaactataagatataaattattaaaaactttattaattgtgctggtttcctgactattcattaatataaaacaataggttgagccaccatgactgcgctagcacaccccgttatccctcagacccaggatacccgactcgagcagcagatacttcgacgctctattttctgcactttgattattgcggggatgggaattggttttggtattttatgtgggtcgatctcgattatttttgacggcatgttttcggcgttagatgccggtatgtgcagtttatctctactggtgtcacgtttattaggacagccgaatagccgccgttttcaatacggcttctggcatgttgaacccttggtactggcatttaacggcagcctattggcctttctatgtctttacgcctttgtaaatgctatcaaaggcattacagaggggggcagggagctggaattaggctgggccattgcgtatgcgttagcggtcagtattttctgttttaccattttcctgaagcagcgccggttaaataaacaggtgaaatcagagctgattgcgttggataccaaaagctggctgatgtctgcctgcatcagttctgcgctactggtggcttttctgctgtcctggagtttggaaggcaccgcctatgagtatctgattgtttataccgatccggcggtgttggcattgttaactttgattttgattccggtgccaattaaaactgtcatatccgccgtgcgcgaagtactacaaatgacgccggatacgcttgatgcttctatcgaacgtattatggaacgcttaattctggaatacggtttcctggattattcccattatgcaacacgggtcggccgaggtttatttattgaaattcatgtggttattccggaatctatggaaaatgatggcgtacggcgttttgataaaatccgcgatgagatagctttggcgattggagaccccggaccgcatcgctggctgacaatttcatttacccgcgattctaaatggctgtaattattgtttagccttcaggcgttctccccaaaatatcaacgaatgaagaggctttattctgtcgcactatctacgggggaatggttctgccagattctattattatcccgccattggatatacatcggtgaattacgctcgattcccgcaatcaatttatattaaagattatctgatggcgctgtattgctgtttttttctaaatatttcttaaacaactggcgaaagctgagaacttttcaaaaaaggcgtgctttaatccctgcgcaataaaaatgcagtatctcgtttggcgaggctcctatacaaacacaggttactgatctgacgacatcgagagatgcccaaggttaagacaggctttatcggattaaggtttagcccaaagtaacttctgatgactctatcagatacgttgtatagtgctaaaacctggacgcggagataggcagtctgcactccctctttggttaccgcccctatgcgatcactgttgaagtcttaacagatatagggacaatcatgattaactcactatcacacaataatgctcagctcaacaccaacgccgatgtctgcgaagatgcatccgtcgcggcttatatgagcgataattttattactatttctgaaaaactgaccgctaaggaagcctgtgactatttgctttctcagcttcagacggatgaaattccttctcaattatttgtcaccagcgatgattatcacctgtgcggcgtgctgtcggtaaagaagttactgcaatccatcgagccgaacagcccggtcggcaccatgatgaaccaaacctttttccatgtttcccctgacgatgagcgtaatgatgtcgcgcatctattaaataaaggcggcgtagatgtggtgccggttttggttaatcggaatttggttggagtattgggcgaaaaagaaattgctcgtctgatcgaagatgaaaataccgaagatgcccagcgccagggtgccagtttgcctttggataagccttatttaagtaccagcccgtgggaattatggaaaaagcgctgtccgtggttgctgatgttatttgtggccgaagcttatactggtacggtaattaaagcgtttgaagaacagctggaagcagttattgcattagcattctttattccattgctgattggtaccggtggtaacagtggaacgcaaattacgtctactctgattcgcgctatggcattaggggaagtcagtctgcgtaatatcggtaatgtgatcaaaaaagaggtcacgacctcattaatgattgctgtcaccatcggtggtgctgcctggattcgcgcgtggattatgggcgtgggaatggacgttacgttagtcgttagtctggcattggtcgctattactatttggagcgcctttgtttcatccattattccgatgctgctcaaaaaagccggaatagatcctgcggtagtttcagcgccctttatcgccacttttattgatggtacggggctgattatctacttcaagatcgcgcaagttgttttgaatatataaccaaagagtgggtatgacgacggaacgctgcgcttgtatatgagtacagaaatggtcaattttctgagtaccagtgcagcgtttttaataaagatgtagccgcggataaatcaattattcgcggctaacgtaaaaagggattgaggaggtggtcatcgcaacatattgtttggtaaaaatattaaggggattattatagattagatcaaacaaaggtttgttatgaataacatgacggtatttatgtggtttcttggaattatcagcgtattgggttttgtggccatttatatgagtgcgaaatgggatgaataacagcaaagggtatgattttgcctagaagcatccttcctgcaaaaaatgtaggatgtgcaggaaggatgagcatgcttaatgattatcattgtcaatgaagtaagtgaataagtattttataaaataaagcaggtaaagctcggatttattttataaaatatacaaggaaggtggttatggtcttttatattatcggcattctttatgccacctttatgatttctgtcggtatttacgagattaatctggatacgggagaaagccaggaaactttttatcggatattactggtgttctcaggtagcataatagtcgttgcctttatatggagcctgttacatcggctgaaaggctcgaaaaaataaagagaagaggctgcgcaaaagttaatcattcgcatttctcttattaactgaattactaaagttaaagcatccggcctagggcgggagatttttttatgcccaaaatcggtcgatgtaaatccagccgtcgctaagtgagtacgacatgcaaaatgaaaaacaagacgttgccttgaagtctatggtggccagcgggttactttcggttggtaaatttgtcgtgggcatatttaccggtagtattggtttgatttctgagggaattcattctctgacggactttattgctacaactattacctggtgtgcggtgcgcgtgagcgataaacctgccgatgaagatcaccattttggtcacggaaaggtcgagaatatggcggctctgtttgagattctactgttggtaatggcggcgggctggatcgccgtcgaggcatggaaacatttctggggggaaactcagcccattatcgctgcgccagcggttattgcgacgttgcttattgcaatggtgattgatttctaccgggttcgcgcgttaagacgagttgcagcggaaacaaatagcgctgcgctagaagccggagcgttgcattttctctccgatatgatgtcatccggagtggtgttgctgggcatggtatttgttttattaggctatccaaaagccgatgcggtagcggctatggtagtcgcgctgtttattctggtgacggcaatcaaattaggaaaacgctcgtttaataccttaattgataccgcgcccgaaggaatacagcacgaaattaccggttcattgacgcgtttcccggaagtgcttggcgtagctaaatgccgggtgcgcgatgccggagctatgctatttatcgaagtgactatcgtagtatgcagaacgttatctttggaacgtatcgatcggttaaaaaggcatatttccgaacaattggtggcggattatagcgaggctgaaataaccctattggctacgccgaagaaaagaagcgatgaaaatatggcgactcatttacgggttatcgccgccaataatgacgtagccattcataatttaactttgcagcagttaactagccatacctgtattagcctggatttagaagtgccagcgcatttcagcgtgactcaggccgacgtggtggctaaagcgatgaaatcggctatccgtaacgatttgggcagagaaactgaagtcgatattcatattgaaccgcagataaactacttgctcagcacggaagatgtagcggaagaagaactgacgatgattagcgaggctttacagcgtttaacgcagcaggacagcattttgcgagggattcaggatgtcaaagcgcgaaataccgacgttggtatcgtagtcagtttcaattgtatcgtgctgccttttatttctgtgatcaaggctcacaccgccatcgataatatcgaaatgaagctgcgcgcactttatcccaccatttcccgcgttgtgggttacgttgagccgacaccggttaatcctgctccggcaataatggccaccccgatccccgtcgctcccgtgcctacgacataaagttcagcaattattgctgtgcatggctgtgtgccgatggcgcgttttacgcgattaaccgtcagacagccgatattattcatgacggtttctggacaggaaagcggtgactaaaagcgtcattctcggcgggcgatgggaaattgtgcaaacgaagggcgatactgcggccatattgtggcataatgcgcgccgaatcacatatttctaatattgatctccccctattcagtaatccaatcgagagcaagctctgtgctaagtactaacaatatcaccatgcaattcggcagtaagccgctgtttgaaaacatctctgtaaaatttggcggcggcaaccgctatggtttgatcggcgctaacggctgcggcaagtcaacctttatgaaaatcctcggtggcgatttagtaccgagcgcaggcaacgtattcctcgatccaaacgagcgtttgggtaaattgcgtcaggatcagttcgcctttgaaaacaataccgtactcgacaccgtgatcatgggtcatggcgagctgtgggaagtgaaagaagaacgcgaccgcatttacggtctggccgaaatgagcgaagaggacggctataaagtcgccgatctggaagttgcctacggtgaaatggacggttacagcgcagaagcccgagcaggtgaattattacttggcgtaggtattccggtagaacagcattatggcctgatgagcgaaatcgcaccgggctttaaactgcgtgtgctattggcgcaggcgctgttctccaacccggaaattctgctgctcgatgagccaaccaacaacctggatatcgatactatccgttggttagagcaggtgctgaacgaacgtagcagtaccatgatcattatttcccatgaccgtcacttcctgaacatggtgtgtacccacatggcggatttggactacggcgaactgcgggtttatccaggtaactacgacgaatatatgactgcggccactcaggctcgtgaacgtctgttgtctgataatgctaagaaaaaagcgcagatttccgagttgcagtctttcgttagccgctttagtgccaacgcctccaaatctaaacaggcgacttcccgtgcccgtcagattgataaaattcagttggatgaagttaaggcctcaagccgtcagaacccgttcattcgcttcgatcaggaaaagaaactgttccgtaacgcgctggaagtggaatctattactaaaggtttcgacaacggcccgttgtttaaaaatctgaagctgatggtggaagttggcgagaaggtcgcgattctgggccagaatggtattggtaaaaccactttgctgaaatgtctggttggcgagactgaactggattccggcagcgttaagtggtctgaaaatagcaaaatcggttattacgcgcaggatcatgccagcgatttcgacattgacctaacggtcttcgactggatgagtcagtggaaacaggaaaaagacgacgagcaggcggttcgcagtgttctgggtcgtttactgtttagccaggacgatatcaagaagaaagttaaggtgctgtctggtggtgagaagggcagaatgctctttggtaagctgatgatggagcgtccaaatattctgattatggatgaaccaactaaccacctggatatggaatccattgaagcgttgaatatggcgctggaaatgtatgaaggtactttgatcttcgtttcccatgaccgcgaattcgttagctcactggcgactcgtgtgattgaaatgactccaggcaaaatccacgactttaccggtaactacgaagactatctgcgtagccaaggtattcagtcttaattaatatcgattagcgctgaaattaaaaaaggctggtgcaaatgcatcagcctttttgttttctggcgtagcctaacgcttagtttttaccgcagacttcgcagtgaggtgctttcgccagcttcatggtgcggaattccagcgtcatggcgtccagcattagaagcctaccacggcgtacctcgccgtaaccgctaagcagcttaatggtttccattgcctgtaaacttcctatagtgccgaccaatggggccatgacgccggtttccacacaggtgaggggggtatcaccgaacaaacgactcaggcagcgatagcacggctcatcgtcctgataggtaaatacgctgatttgcccctccattcgaatcgccgcgccggaaaccagtggctttttctgaacaaagcacaggcggtttagttgttcgcgaattgccaggttatccgtgcaatccaggactaaatgatgatcggcgatagcggctgagagctgcgaatcatccagttggcgatccaacgtagccacgctcaaatgcggattgatttcttctaaagtcaggcgcgcagacgcgactttgctcatgccgatccggtcatcccgatgcagaatctggcgctgtaaatttgataaagacacggtatcaaaatccagcagcgttaaatgcccaacgcccgccgccgccagatattgcgcggcggcgcagcctaaaccgcctagcccgacgaccaagacgcgtgaggctttaagcttttcctgaccgtcgaaatcgaaaccgcgcaggacaatttgccggttgtagcgcagcatttcagcatctgaaagttccggcagcatatcagcctcccagcaagccgttaaatagctctatgtctacgctttctccaacggcgaccgaacctcgatcccgttctaaaacgataaagcagttgccttggctgaaggcgctgaaaacatgcgagccttgatgcccggtggagctgacctccagcttaccgtcggcaccgcgggagaaaatcccacgctggaaatccagtcgtcccggcgattttttcaatggcgtaatcgccgttgcagtcaggcgtagcggcggttgccatgaagtctgtccggccagtttagccagcagcggttgcaccagttgatagaaagtcacaacggcagaaaccgggttacctggcaggccgcagaaccaggcgttcttcagtttgccgaaagcgaaaggtttacccggtttgattgccagtttccagaagccgatgtcgcccagttcttctagcatttgtttggtgtaatccgcttcacctacggaaacaccgccgctgctgattaccaaatcagccgcttcatcagcctggcggaaggcgtggcgcaaagcttcctgatcgtctgggatcacacctaaatcgataacctgacaacccagttgttgtagcattaaatgtacggcaaaacggttggtatcgtaaatctggccttctgccagcggttggcctacggcctgtagctcgtcaccggtagaaaatatggcgactttcaactggcgcatgacctgcaatttggcaatgccgagggaagctaacaggggcagttcggctacgcccagtttgactcctgcggggaacacgctggcaccttgctggatatcttcccccgccaggcgaatattttgcccagcttttaccggggcggtgaataacacgccttgttcacttacgctggcctgctcttgcataatgaccgcgtcggcaccgctcggaaccggcgcaccggtcataatacgaatgcagctgttggcgggccattcaccgtggaatggcgacccggcaaaggctttcccagcgacggacaacgcagtttgggcattcacctcatgactgcgtacggcgtaaccgtccattgccgaattggcgaaaggaggaacgttaatgggggaagtcactgggctggcggtaatccggcctgcggcatctgtcagcggaatattttccgtctctgtgagcggagtaacctgcgacagcatttttttcagcgcctgttccagagaaattaaatccgaggtgttacagtgatccatgctggactccgtggtcaggacattccggcgggtaagtcagtcaccggcggtaaaatatccaatcaaaaagggtgagggcggctattatggcagagatcgacaagagggtgaatgaattgaccggcaaagggaccggcgacgtcacactcggagcagcgcatcaggggataaacgggagcacatatgaatagccaacagattctggatttctggtttaatgaaatagacccggcattctggtttacaaaaagcgatgatttcgatgctttgctacacaaacgttttggcgcggtctggcaggcggcgtccaagggcgaactggcggaatggcgacaaactatcgacgggcgactggcagaaattatcgttttggatcaatttagccgaaatttattccgcgatacgcccgcttctttctcctgcgatggtatggccctggtgctggcgcaagaagccattcatactggcttaaccgggcaattaacgccggaacagcgcgggttcctctatttgccgtttatgcattcggaatcacagaagatacatcagcaggctttagtgttgtataccgagcttaataatggcgaccagttggagtatgagctgcggcataaagcaattatcgaccgctttgggcgttatccacaccgtaaccatattctcgggcgagtttccagcgcggaagaacaggcgtttcttctgcagccagggtctggcttctaaaaatgccacatcagaacctggctattacgaatataagatggctaggttcttatttattttagtgatgcttaaaaagcaatttccgcagccatcctttattctcctgttctatcaggaattttttaatagaaaacacattggcgtcggagtgccaaatttggccgcgatcgctacttcagtattacagcgtttcttaaaacataccgcttcgtattcaccatgttcattgatggcatgatcaagtgcgaagaaaataaatggtgataaaaataacgttcgtcatgttagttaggtgtttatgaaggaatatttattgcgattgaaaataatgaggcgtaattcaataaaaccaataaacccgaggggctataagcaggattggccaataaaatggcaaaaataaattaatatttatcgcctaggggaagggcattgaaacgaaatataatgacagaggaggaatgattagttggggaataaaaattattccccaatggagcgacttagttatgcagatactcagcgtggaagcgcagatgatcttcaataaatgtcgctatggtgaaatagctgtgatcataaccaggctgaatgcgtagcgtgagcggccagtctttttggcgcgcgagttccgccagtttggctggttgtagctgatcggccaggaattgatcgccatcgccctgatcgaccagaatcggcagcggctggtcactgttaaacagtaaatgacaactatcatattgcagccattttgtttcatgttcaccaagatattctgtgaatgctttacgcccccacggaacctgacaaggattaacaataggagcaaaggcagatactgactgatattgctgtggattacgcaatgccagcattaaggcgccgtggccgcccattgaatgtccgctgatagattgccgttcgctaacgctaaagtgttggcgaattaacgccggtaactcttcgctgacataatcgtacatacgaaaattcgctgaccagggtttctgagtggcattcaggtagaaacctgctccctgacccaaatcgtagttttcgtcattcggtacgtcttcgccgcgaggactggtatccggcatcaccagtaccaatcccagctcggctgcaatacgctgcgcgccggctttcagagtaaagttttcgtcgttgcaagtcaggccagacagccagtacagcaccggcggcggattatcatcacgcggtggtggcagatagatgctgaatgtcatgttgcaattcaggctgcgggatatatggcgataacgctgctgccagccgccaaacatccgatgctcttcgagaagttcaattgacgtatgcatgtctgctctgcctcctggctttatttattaaagtgaatcacgctgcgaatagatttaccttcatgcattaaatcaaaggcttcgttgatttgctccagacccatagtatgagtaataaagtcgttcagctggaatttaccgtctaaatattgctgcacaatgcccggcaactgggagcgtccttttacgccgccaaacgcagagccacgccatacgcggccggtaaccagctggaatggacgggtggaaatttcttcaccggcaccggctacgccgataatcaccgattcgccccagcctttgtggcagcattccagcgccgagcgcataacattaacgttgccaatacattcgaaggagaaatctacgccgccgtcggtcagctccacgatcacgtcttgaatcggtttgtcataatcttttggattaatcaaatccgtggcgcccagtttgcgggccagatcgaatttactggtgttgagatcgataccaataatacgacctgcgccagccatctgtgcgccgataatggcggacagaccgatgccgcccaggccaaatattgccaccgtatcgcccggttgtactttagcggtgttcattaccgcacccatgccggtggtgactccacagcctagcaggcagacttcttccagcggcgcttctttattaatcttcgccagcgaaatttccggtacgacggttaattcggagaaagtcgatgtgcccatgtaatggaaaataggctgaccatttttagagaagcgggtagtaccgtctggcatcaaacccttgccctgagtagcgcgaatcgcctgacacaggttggttttgccggagcgacagaatttgcattccccacattctggggtgtacagcggaatgacgtgatcgcccacggcgacgctggtgacgccttcgcccacggcctcaacaataccgccgccttcgtggcctaaaatcgccgggaagacgccttcgggatctttgccagacagggtgtaagcgtcggtatggcaaacgccagtggcgacgatacgcaccagcacttcgcctttttgcggtggcatcaggtccacttcttcaatggatagcggctggttcggcccccatgcgacggcggcgcgggttttgatcatctccatggtgttgctcctcggtttttcacgatagtgttatgtaaattgactttttatgtatactatttgttgcgttaacgttttaagttacgggttttgcagtggtttcaatttgctcaataatcagctctttcagtgcgcgaacgttcgggctgaaggcatcttttcgccagataagccaggtggcggtatcggcaaattcagggggtaacgggtgtacccgaacccgttcgtggccgggtagtaatgccagtactgaatggggtatgagcgccagaccggcaccgctggcaacgcaggccagcatggcgtgatatgactggatttccagaatagtgccaggcagcacgccagcctgtcgaaaccatgactccagccttaaacggtaggagcaactggggcggaaggcaaatagggtttcatccacagcgtctttggcctgactgatcggcgggtgatccaggcatgagatgatcactaattgttcttcgaaagatcggcagccatgtagttcttcatggtgaactggaccatcgaccaatgccgcagccagcgtaccggcgcgtacctgttcgataatttcgccggaagtgccggtgttcagcgatagtgaaacctgagaatagcgttgatgataagcggccagtaagttgggtaaacgcgtggctgcggtgctttccatcgatcccaatggaaaattgcccgcaggctcaccggcatgggtaatacgcatggcttcttcactcaacgccagaatacggttggcgtaacagagaaaattatggcccatcggcgacaggcgcagacgctgcttttcacggataaacagatcggtacccagctcaacctcaagctggcgcaggcgggtggttagattcgacggcacgcgatgcatctgttccgccgctctggctaccgaaccggtttccgctacgcagcaaaacatgcggagttgggttaaatccattactgttctctttttgtgatgaacttcatgagtattattcattttttgtgattctaatgctgaggcatgatattagcaactttcttttaaccggcagtttgggaacaggcagaacagagtcatggcgttaagaatcgctttaagtgggtttctggcattagtggtagcaatggggattggccgatttgcttttacgccgcaggttcctctcatgatagctgaacatcagttcagcctgaccggcgcggggctggtggcggcattcaactatctgggttacctgtgtggtgcctacgatgcgatgcgagccaatcgttacgttgagcgtcgcctgtggctgggcgtatggggcgcagtgacgctgacattgctctccgccgtaatagaaggcccgtggtggcacggtgtggtgcgtttcgctatcggttgggccagcggctggtcaatggtgttggtggcagcatggactaatgagcgactggcgcactatggtcgcccggcttttagcgctgcggtgtttgccgggccgggagcgggtatttttattagcggtatactggccgttgtgattcatagctacgggttaacggcatcgcaggcttggctggtttacggtgtgttggcgctggtgctgattggcgcgatcagtatcaacttacccagagcaggggagttacatcgcccgcaggtagcggcggaaccgttgattttgacgcctgcgctgaagcgtttggtctggagctacagtctggccggtttcggttatattttgccggcgacgtttctctcacaaatggcggccgcgcgttttccagacagcctgttcgctcagtttgtctggccggtttttggtggtgcagccgtggttggtattggcttaggcattttgacgcgtcgttgtctgacgactcaaactcgtctggcattgacgctgtgggtgcaggcattaggggttctgtgcgctgaattagtgccgggcgtgagcggtttggctctcggcgcgatgttgaccggcggcggttttctctgtgtggtgcagctatctttgcagcacgggcgagagctggcaccgaatcacacgcgctacatggccggtttgctcaccacgggctatgccgttgggcaattagtcgggccaatgctgtctgcgacctccacggcgttaactcaccggctagagcctgcgctgtatgtggcggtcgtcgccctgattgtggccggggctttggtgttcaatacggcggcgcgcgccggagaaaaaacgacgggataattcggggagataaagcatctgaaaccgctgtggataagggcatattgcccttatttcatcatgatatgaaacacaatcactggataatctgcacgctctcatctagagtggggcacaaaatccggacgtgatctgcatcaatgtttattcccgccgggtgcgtaagcctgttggagagaagaatgtcatcgctaagtaaagaagcaatattggtccatgctgcattggaagcccgtggtctcgaaaccccgttacgaggacaagtgttagattctgaaacgcgcaaacagcgcattcaggagcatatgacagaaattatgcagctactgaatctcgatctgtccgatgacagtctggccgataccccaagacgcattgccaaaatgtatgtggatgagattttctctggtctggattacgccaatttccctaaaatcaccgtcattgaaaacaaaatgaaagtggatgagatggtcacggttcgggatatcactctgaccagcacttgtgaacatcattttgtcactatcgatggtaaagccaccgttgcctatattccgaaagacagcgtgatcggtttgtcgaaaatcaatcgtattgtgcaattctttgcccaacgtccgcaggtacaagaacgtttgactcagcaaattttgctggcgttgcaaactctgttaggcaccaataatgtggctgtgtccattgatgcggtgcattattgtgttaaagcacgcggtattcgtgatgcaaccagcgcgaccaccaccacctctttgggcgggctatttaaatccagccagaacacccggcaggaattcctgcgcgcggtgcgccatagcagctaattcctttattgaacgagacggcacgctaaagtgccgctaaacaggatgtcgagtatgcgtcaacggatcgcaactttggacagcgcgagagggttggccatttttggcattcttctcctcaatatcagcgcgtttggtctgcctaaggccgcctatctcaatcccgcttatctgggaatgccttcgctgtctgatgcctggacgtgggcaattctggatatttttgctcaagccaaattcttatcgatgttcgctattctattcggcgcaggtattgaattgctgttgcatcgggggaaagggtggatacaggcgcggctgtctattttgctactgctaggattaattcacggaatttttttctgggacggcgatattctgctggcctatagtctgatcggtttagtttgctggcgaatgattcgtgatgctaaaagtgctgaaagcttattaagaaccggcggagtgttgtatctgattggcgtcggcgttttgctattactcggttttatcgtcaccggcgagccagggcagttttggatgccgggaccggcggaattacagtacgaacagttctggaagctacaggggggccgtgaggcgtggataaatcgcgttgatttattgtcttccaatttgatagcaatcggcgcgcaatacggctgggaactggccggctttatgctctttggcgcaggattaatgcgcagcggctggctgcgtgggcagtttagtttgctgcactatcgcctacaggccgcgtggatgataccgctttcactggtcattcaaatcccggctatcgctctgcaatggcatctacaatgggaatatcgctggaccggatttttgctgcaagtgccgcgggaactgggcgcgccgctgcaaacgctgggttatctggcgttgtgttacggtttttggcccagtttgtcccgcctgcgtatcagtcactggttagccaacgttgggcgtatggcgctgagcaactatctgctacaaacgctgatttgtatcaccattttctaccgtttcggtctgtatcagcaattagatcgcttgcaattattagcggtggttccggctgtttggttatgtaacctattgttctctaacctatggttatcctgtttcaaacaagggccgctcgagtgggcgtggagaaggttgaccgcacaggcctgtggacaggtggcagagagcactgatagcaagaagtaatctacttgatgaataaactgaagctggttagttaaaaatttgtatgtaagcgttttctttcctgtgacgtatttcacgtagtcgcaaccctaaactggttaggataagtgccaatatcggcagtatgcagaatgaatgcgctgccttcctcaccacagggcgatgtttctatggccacagtcaattccattactattcgtgatgttgccaaactggctggcgtttctctcgctacggtatcccgagtgctgaataaaagtgcggcgatccgtccggccacgcaggccgcagtgattaaagcggtggccgagctggggtatcgccccaatgccaatgctcaggcactcgcgaaccaaagtagtgacaccattggcgtggtggtcatggatgtctccgatcccttttttggcgccttggtcaaaacggtcgataccgtagcgcaacagcatgataagtatgtattaattggtaatggctatcatcaggctgacaaagagcgccatgctatcgaagtgctgatccgccagcgctgtaatgctttggtggttcacgccaaagcgttagatgatgcggaactgatcgcttttttggatcaaattcccggaatggtattaataaatcgaatcattcccggctacgaatcacgctgcgttgggctggataacgttagcggtgcgcaaatggccagccgattactgttgaaacacggccacagacgcattggttttcttggttctaaccaccccattgacgatgtgattcagcgccagcacggctatattcaggctttggaagcagcaggggtttacccgcaggagagttggcgtacctacgctacgccggatttggccggtggagaaacggcgatgatcgatttgctgagtcgcaatctcaatttgagcgcggtttttgcctacaacgattctatggctgccggggcgctggcggttctaaaagaaaacggtatcatcgtcccggagcagttttccctagtgggttttgatgatattcctattgcgcgctataccagtccaaaactcaccacggtcctctatcctattgtttcaatggcaattttagctactgaattagccctctccggtgccagtcaatcgcgagaggataatgccagctattgcttccagccgacgttggttccgcgtcactccgttacttcctgccaaactgtggcatcgctcactagttgagtatttattattgtgtaaccgttttcaatctgtgagaaaattcacagattattaacaaagccccgtctatgctttattcgttttctctctgcctggatcgcaattttaccgctgaggtaaggcaaattaccggtaatgaccccgcagatagtgtgatgttgttttgccttcactcgcggtaagcggtgctttctcgggaaactgaccgttaagcactgatatgttcgctggtggcaggctacttacacagctttttcggagttgagtgaggtcaaggacgatagatattcagttgtcagctgctctgaccgatggtttcgattatcgctaaggcaacggtgttatcaccctgtactaccctacataaacccggagatacaaatgaataagaaggttttcactttagccactctggccgctagcatgctgtttggcgcggccgctcaagcagatacccgcattggcgtcaccatttataaatacgatgacaactttatgtcggttgtgcgtaaagccattgaaaaagaagccaaaggttcgcctgacgtcacgctgttgatgaatgattctcagaatgaccaatctaaacaaaatgaccaaatcgacgtattgctggcgaaaggcgtgaaagcgctggcaatcaacctggttgatcctgcggcggctccggtcgtgattgataaagcccgcgcaaacgatatcccgatcgtgttctacaacaaagaaccttctcgtaaggctttggatagctacgataaagcttattacgtgggtactgattctaaagaatccggtgtgattcagggcgaactgatagccaaacactggaaagcctcaccggcgtgggacctgaacaaagacggccagattcagtatgtactgctgaaaggtgagccgggccatccggatgcagaagcgcgtaccacttacgtgattaaaacgctgaatgataaagaaggcattaaaactcagcagcttcaattagataccgcgatgtgggataccgcgcaggcgaaagacaagatggatgcctggttgtctggtcctaatgccaacaaaatcgaagtggttatcgcgaacaacgatgcaatggcaatgggcgcggttgaagccttaaaggcgcacaacaaaaccaatattccagtatttggcgtagatgcattaccggaagcattggcattggttaaatccgggcaaatggccggtacagtgttgaacgacgcgaataatcaggcaaaagctacctttgatttagcaaaaaatctggccgcaggcaaagacgcgactgacggtactaaatggaaagtggaaaataaagttgtgcgaattccatacgtgggcgtagataaagacaatctggctcaatttaccaaataagtatttattacctgctgctccgtttcgctcaggggggccgggcggatcagcgggttttatcaggtatccttattttaaagcggttttgatcgccaatgatgcgaagccgttttttagccaggtgtagctatggccgatattaatacagcacagccgcgcgagtggttgctggaaatgagtaatattaataaatcatttccgggcgtaaaggcattagataacgttaatttaaaagtccgaccgcattctatccatgccttaatgggagagaacggtgccggtaaatcaacgctattaaagtgtctgtttggtatctataaaaaagactctggcagcattatcttccagggcgaagaaatagaattcaaaagctcaaaggaagctcttgagcatggcgtttcaatggtacatcaggaattaaatctggtattacaacgtacggtgatggataacatgtggctggggcgttatccaaccaaaggtatttttgtcgatcaagacaaaatgtacaaagataccaaagcgatttttgatgaattagatattgatatcgacccgcgtgataaagtggctacgctatcggtatcgcaaatgcagatggtcgaaatagccaaagctttttcctacaatgccaaaatcgttattatggatgagccaacgtcgtcactaacggaaaaagaagtgaaccatttgttcaccattatccgtaaattaaaagaccgcggctgtggcattgtttatatctctcacaagatggaagagatattccagctgtgcgatgaaattactattttacgcgatggacaatggatcgccacccagccgctggccggcctggatatggataagattatctcgatgatggtcgggcgctctctgagccagcgtttccccgatcggcaaaataaacccggcgaagttattctggaagttaaaaatctgacttcactgcgtcagccttcaattcgcgatgtgtcctttgatctgcataaaggggaaattctcggcattgccggtttagtgggggcgaaacgcacggatatcgtcgaaacgctctttggcattcgcgagaaaatcagcggaaccatcaaactacaaggtaaatccatcaataataacagtgccaacgaagcgattaatcatggctttgcgttggttacggaagagcgccgttctaccggtatctatgcgtatctggatattggtttcaactctctgatttctaatattcgtaattataaaaataaatttggtctgctggataatagccggatgaaaagcgatacccaatgggtgattgatgccatgcgggtaaaaactcccggccatagaaccagtattggctcactttccggcggaaatcagcaaaaagtgattattggccgttggttattgactcaaccagaaatattaatgttggatgaaccgacgcgcggtattgacgttggggctaaatttgagatttatcagctcattaccgaactggcgaaaaaaggaaaagggataattattatttcatccgaaatgccagagctgttagggatcaccgacagaattctggttatgagcaacggtctggttgcgggaattgtcgaaacgaagcaaacctcgcaaaacgaaatattgcgtcttgcatccttgcacctctaatctagttgaaggttcttattatgaatgcgttaaataagaaaagcttgctcacttatcttaaagagggcgggatttatgtagttttgctggtgctgctggcaattatcattttccaagacccaacttttttaagtttgatgaatttaagtaatattttaactcagtcctcagtacgtattattatcgcgttgggcgttgccgggttaattgtgactcagggtacggatttatccgccggacgacaggtcggtttggctgcggtcgttgccgcgactatgttacaagcgatggataatgtgaataaggttttccctgatttacaaaccgtacctattccattcgttattttaactgtctgtctgattggcgcaattattggtttggttaacggtattattatcgcctatttaaacgtcacgccgtttattaccactttgggcaccatgattatcgtttatggaatcaactccctgtattacgattatgtgggcgcctctccaattgccggcttcgatcctgcgttttcctcatttgctcagggattcctgcgattcggtgattttaaactctcatacattacgttttacgcattgattgctattggctttgtttgggtgctgtggaataaaactcgtttcggtaaaaatatcttcgccatcggtggtaatccagaggcggcaaaagtttctggggttaacgttccgctaaacttaatcatgatttatgcattgtccggggtgttttacgccttcggcgggatgctggaagcgggacgtatcggcagtgccaccaacaacctcggttttatgtatgaattggatgccatcgcagcctgcgtggttggcggcgtatcctttagcggcggggtaggtacggtcttcggcgtggtcaccggggttattattttcacggtcattaactacggtttgacctatatcggcgtaaacccttactggcagtacattattaagggcggaatcattatcttcgccgtggcgctggattcactgaaatatgccaagaagaaataaaggctaattgaaagacggtctcgattaagagaaaagccagtcaggagtcatccggctggcttttgtttttttatacagtttatggcgactgagattcttggttctggcgccgcgagggacgcttcggtggcttacgccacttcgattccctcgccgcattctcccgttactacctcggttgttcaacacccaggtgcggcacgctcgcggatcaggttatttctctcgcttatcagctgccagcttatgttccagttcgaccaactgttccggtgataccgcaggataaccctgagcatcatcaggcacgatatgcacagccggaataggaatcagtggcccaagaaaacgcggctcgcgcttcaaaatatagaggtcagtcaatgcacccaagcgagcaaaaatctctctgactcgcaccgaaagcatatttttcggtgaaggaaccgcatagcactgcgcctgaatccccatgtgcatggctataaacagcgcgcgttcgcagtggaaacgctgcgtgacaataataaaatcgttggtgtcgaataccttgcgggtgcgaacgatagagtccagcgtgcggaaaccggcatagtccagcacgatatccgcaggagccacgccagcggcaataagatctcgtcgcatggtcatcggctcattataactttgctgcgcattatcgccgcttaacagcaggtagtttaccttgccgctgttgtaggcgttaatcgccccttgaatacggtaaaggtaaaactgattgatgacgccggtacgataatattttgccgttcccagcaccacgccgacctgacgatgaggtaattgttgaatttcatcatagatatagggggcggttttccaactaatccaacgatcgagcacaatagccgacgccatcagcaatcctgcgatgataaataagctgaaaatcaggcgtttccacattctcgggccttggttgcgtcgatgcttggggttatctgcaaggctactttacctgatacggcggcgcaagacgtgacgagggcagttaagctgatttttgtcattaaaaagcaaggatttctctaactggatagagattaacctgcccgagggcaggttgaggtaaaactagaatgaggtacgcttgtaggttcggtactgaggctgccaataattatgttcgatagcctgcgccagcgcgttatcagaggtgacggtcgccacgccctgtaactgtgcggctttacccacctgcatcgcaatactcttggaaacagcctgaatatcatcgatattcggtagtaaagccccttcaccgtgaatagccagcggagaacagtcggccaatgcgcggctggcggccatcagcatgccatcggtaatgcgacgggcaccggatgctaatacgcccaaaccgatacccgggaagatatacgagttgttgcactgagcaatagggtaaatagtctctttgtagctgaccggcgcgaacggactcccggtggcgaccaaggctgcgccgttcgtccagttcagaatatcttccggacgcgcttctacccgtgaggttgggttcgacagcggcatcacgatagggcgcgcacagtggctgtgcatctcgcggatcaattcttcagtaaacaagcccggctggccggatacgccgattaataccgttggcttggcgtgacgaaccacgtccagcagtgagatagcatcgtttttcaaatcccagttttgcagattttcgcttttctgcaccagcttgctttggaaatccagcaggtttggcaatttatctgtcagtaaaccgaagcgatcgaccataaacacgcggctgcgagcttcttcttcacttaagccttcggacatcatctgcgcgataatctgttctgcgatcccgcagcccgcggaacctgctcccaggaaggtgacggtttgatcccgcaattgactaccggcggcacggctggcggcaatcaggctgcccagcgtcacggcggcggtgccttgaatatcatcgttaaagcagcaaagctcatcgcggtaacggtttagcagtggggtcgcgtttttctgggcaaaatcttcaaactgcaataatacgtttggccagcggcgtttgacggcctgaatgaattcatcgacaaattcgtaatattcgtcgccggaaatacgcggatgacgccagcccatatacagcggatcattcaggcgttgcgggttattggtgcccacgtccagcactaccggcagggtataagccgggctgataccgccacaagcggtgtacagagacagttttccgatgggaattcccatgccgccgatgccctgatcgcccagacctaaaatacgttcaccatcggtcacaacgatgactttaacgttttgtttggtggcgttttgcagcatatcgtcaatgcgatcgcggttcggataggaaataaacagcccgcgagctcggcgataaatatcagagaaatgctcacaggcttccccgaccgttggtgtgtaaataatgggcatcatttcgctcagatgcgcttccaacaggcggtaaaacagggtttcgttggtatcttgaatattgcgcagatagatgtgtttatcatcatcatttttgaagtcttggtactggcgatacgctcgctcagcctgttcttcaatagtttcaactgcttcaggtaacagtccatgcaggttaaagtggctgcgctcgtcgtcagtaaaggcgctgcctttattcaataagggaaattccaacagaatcggccctgcgtagggaatgtacagcgggcgtttactttcgtattcaagttccatgagttttactcttaagcgttatcggatagccgttactgactccgatcctaagagatagggaaaatatgtacagcatttgttagcaatttataacaattgccaacagaaatgagagttaaagagcaaaaatcagcgtggtagtgattttaattggcgcgaataatggcgcttattaaagcgcctgattactttaactgttaattaattacacaactcatatttattaaacattagcactcattttgcttatttatatgcgttatgggagtttgtaacagtgagttctatgcgctggccgtatgacacttccagcgtattgccatcgggatcggcaaaatacgcccaataaccgacgggttcaccggaatcttgcggtgcagatcgcagacaaccctctgcgctagccagagcaaccaattcatcgactcgtgctcgactcgcgcaggcaacgccgaggtgtccgaaaggccctaacgctgtgtcttttagctccggagattgcactagaacgatagcaaaggggcgactgtgatcggtcatccatgctacttccataccgggtttgcctcctgcccgacggtgaaccagggtcattccggcgtagcgctgatagaaatccagactgatatcaatatcttgcaccactaatgcaatgtggcttagccctaaatcgagcgaatgattggtatcgattacagtggttgtcataagtatttctccggttaataacttgaggttctcttcaccggtcaaatgattcattattcactcaatgattgataatcgatattttatctagtgagtattcattacatgaataatttgcgtgccatagatcttaacctgctggttatattggatgttttgctcattgaacggcacgtatcccgagcggctacgcggttgcacatgagccaaccagcagtgagccacgcgctgaatcggctacgttatttgctggatgatccgttgctggtgcgtgcgcccggtggttttcagcttacccgtcgggcgcttgagttagttgaacctttgcagcaggtcctggagcaggttcgacaattggtaggttctgctcaatttgttccagcgcaggctagccaaagctttcgcatggcgttatctgattatggtgcagccattgtgctgccggggttgcttcagcggttacgccagcaggctccgggcatcgatctggtggtggtgcagctcagcagggagcagatggttgagcaagtgcttgcggggcagttagatctggcgctgggtgtgtttccccatttgcccgctgggttaagcagttgcaggctatttgaagaacattttgtctgtgttgctgatgcgaatcatccattggggaatgaaaagcgcctaacgctagatgattatctggctcagccgcatttgctggtttctatgcgtggcgaaagtgcgggagaagtggaggcggcactgacggaattgggccttcgacgacggattgccgcaattatgccgcactttctggtggcaccgcaggcggtggtggggacggatttacttttgacgatcgccagccgggtcgtagcgactcagccagaatcaatgaggctacaacgccttgagctgccttttgtcgtaccgagctttgattttgtgcaaatctggcatccacgtaatagtcacaaggaagatcagcgttggctgcggcagcaggtggtggaaagtctctgaaaacgagcgccccggcgaggaaagaaaaatccggggcggttaaagcggttagaaagtcgcgcggcgaacgtccgtgcagccgatagccgccagcgtggcctgagttgcatcccactggcttaataccggcgttgcaggttcagccagaaccgcgcggcgcacagtcagacaatcgctaccggacatattcatcagaatcagcgaggcctgaagtggaggcaagcttgggttaaaagcggcattttccgcatagcgtccggcgaaaattgccccctttgtatcttccagagcgacgccgctgtgcgcctggctataaggtgcatggctgcggttagcggcctccagagcggcctgagccaaagcgtcgctatcattaaggtgataaccgtgatcgaccgaatccatcaataatgtgctgatttccagatcgttagggccaaatgaatcaggcagatagtcaccaagcgttgccgctggacgacctggtagatggatatgtaaaccggtgccgctgtttaattcattcataaactgacgacaatgaccgcacggagtgtaatttacggtaatggagactaaaccgccttctccccgcagccaggcgtgggtaacggcacactgttcggcgtgaatggtttgttgcagcggtgcgccgttgaattccatattggcaccgaaatacagattgccgcttttaccgcgagcgattgcccctactttaaaatgggatatcggcgtgagtgagcaggcggcagccagcggtaacagggcgaatgccagttctgcatcattcagcccactgagagtttttaccgtttcgacttctgcggcggtaagcattgcagggaaatgatcgttgctcagcagtggctccagggcggattgcaatgctgttggcagctctgccagtggggcgcgaaaacgtgcttgcatagaaattctctccaatattaacgggaaactattttaggcagcttgcgcactcttaattgtgatgtagatctcgttgtatatgaaatttatgcaatgaatatattaaatgagagatttatctcaaatttatatgcttaaaattgcttatttggtgttcattgcgcttatttagccgattaaacctgtttgaccgaatagcctgtttaaccgaataaatgcagcaatatcgggaacaggaacggagccaacaatgaggtaatgatcccgcaaatcaccaatgccagtgagctaaatgcgccttcttgaaaatcgacttcagcgcagcgggcggtacccaatgcgtgagaagcggtccccatagctaacccgcgggaggctttagtgacaattcttagccgattaaacaaggtatggccgaatactgcccctaaaattccgacaaaaatcacgcagacggcgctgatagccggaatgccgtttatagaatctgccactgccatcgcgataggcgtggtgacagacttcggtaataccgatgcggcgatctccggtgttgctcccatccataaggctatcgcggtgccgctgaccatcgccgtgatgctgccgataaaacaaatggtgataatggatttccagcgtgcgcggatctggtgcaattgctcatacaacggaaaagcgagcgccactactgctggttgcagcaggtcattcagaattttgctgcctttaaaataattggcgtagggcatatgggtcagcagcagcaagggaatgatgatgaccatagataccagcaatggattgagcagtggcattttcaaccaaatcgccagcttacgcgcgccaaagaacaccagcagcgttaaaggcagcgaccaccagatatgctccattatttgtcctccgactgttcatctaccgaaccgacgatcttgcgttcccgatggacaaactgcgagctgtaacccaccacgatcatgaccactaacgtactgataaaacacgacacaataataggaccaaactgtttactgagctggtcgtaatactgcatcacgccgacaccaatcggtacaaaaagcagtgccatatagcggatcagaatatgacagccgggtttgacccagcgagacggcaggatttgcgaagacagcagggcgaacagaatcaacatgccaataatactgcccggaatggtcattggcagcagcgcggacagtgcgttacccgcccataaacacaggtaaataaagataaaggcccgtaggtattgccagcaaagtgtaatcacattgcgcataataagtgtcctaagtaacggaggcattcatcatacaattatgccgagaaatgtgctaccgatcacaccatgaattatatctatgcttttatgccatttgcgatggcacactttcgtgacgctggcatgactcgcgcccggttgggctagattttttctgatgattgattaaatacattatcctgcgcttttgccaactgataaccgcgatagaaaaaggccaaaccgagtaatgctgccaccatcagcatcacaaacatcatttccggcgcggcgtaggccagcaaaaatccgcacatcaccggattgatagctccccccagattgcctagattttgtgccccgtaatagctgcctttcaaattcgcaggagcaatgaagtcgatgaataaatactccactggaatcacgataatctcgccaaaagagaagatggtcatcgctagcatccacatcggaatagaaccctgagcggtcataaagcctaacagacccacaataaagaacagagtaccgagcatcagccagcgtattaggttctgctgattcatacgacgacttaataaatactggaacgcaatcacaatcacggcgttgaccgtcatgatcgaccctatcacctgataggcaaatttcgcgttggaaacggtgatcaaatattgcgaaaggtagccagtaaattgcccgaagacgacggcgctcaacatgctgccgagcgtgaaatagaccaagcgtttatcctgacgcagaatgcggaacgtttgggcgaaattcagcggcgcaacgcttttgagttcaagactatcttcccgctctggcgggatgccgaatttgtctaacagaaatatcagtgtgatagcgacggctaaagccaggccaccagacatcaaaaaaggcagcatagggctgaacgccgccatcagcacgcccagcgccgggccaaccgcccagccaacgttaactaacgtatagtttgcagagaaagctttgatgcgctgagccaccggtagccaatcggcgaagcaggctttgaccgcaatgctaaataccgaataggccgaatgtagcactgccagcactaaaataatccacgccggttgttcaatccacggcaaggcaaagaaggtgagggcaaacagggcaatagccacaaaaatcagatgatttttattaaacttatcgaccagaaaaccgccgtacaggctggcaataatccccagagtcaggctggcacccaaaactaaaccgacgcgatccggcgctagctggaagtgttctgccagataaatggtaataaagggcaacgtaatggcacgcccaatagtcaacactaatgaagacagcagaagtgtgaccaccaacggaggaaatcctttcatagtgttatctttttattatgttaattgaatgtgacaatggctcaggcagataccatagacgattgtaataataaaaagagagggggaacggaaaatatttttagaaacagcagatcaacctgaatcgatccgctggtagcagcgcgttatcctaaatattcgataatagaaagaccgccgttgtaatccgtactgtagataattccttgcgcatcgacaaaaacatcgcaggattgaactacctgcgggcgatccggtcgcttatccatcattttagtcggcgcagcgggcaccaatgcgccggtttccctcggctggtatggattactgatatcgtaggctcgcacaccggcattttggtaggtggcaaaaatcagcgacgagctgataaaactgccgggacggttttcatgcaaattatgtgggccgaaatgtgcgccttttttgacgtaatcccgttcatttggtaccggaaaggtggaaatactaatggggttactcggctcgcgaatatcaaagacccaaatgtgcttttccccgtcttcctgattatccaataccgcttcgtccaatacgatcaacagatttctgtcaggcaacggcagtgcagtgtgagtgccaccgccaaaaggtgggctccagttacgatggcaaatcagttttggctggtagcgatcgctgacgtccaacagcgtcaaaccgccgtcgcgccagcttccgtaggcggtatccccgctgataatggcatggtgcagcgcatagcgctgaccgtctggccagcttggtgtttctccgccagcgctatgcatgcccggtagccaataacggccagccaccgctggattgcgtggatcggccatatcgatagtcaggaaaatataatcgctgtaaccatccaataaggctgaaacgtaggcccaacgtccgccaacgtaaactattcggtgaattccaattccatccaacggtaaaaagccgatttgtcgcggctggtcgggaatggaaatatcaaaaattcgtaagcccgcgctccagtttcgctccccctgccgggtattgacggttttgcctaccgattgagtgtaatagactttttcctcggcaaaactagcgtcagcaaacagatctcgggcattaatcaccaatagcagatcgtcgtgagtttgtagatgcacgttccaagtattcggcggcgcagggataaaaccgctggggcgcggattttttgcatcccgaacgtcaacgattgatacaccttgagaaaccatatggccgatataggcgtagccgcgatgcaccatcacctgaacgccatcaggccgcccgccctgatcgctatggccaatcagccgcatattgcggctgtattctggctttggtagcgagctgtgggttgtcataagtttgctccgcggttattgaccatttttggccgccagcgtggcgaaccaaggggaattaaaatcgtcagattgaccccagcccggaataattttgctcagactggcgacgttaaccggccccggctgactggcgagcagagcctgaggaatggcggccgcgcggaattcataggttggcggagttgcctctccggcaatttttttcgccaccaaacgcaggttaaccgccccaattaacttaggatcaaccgctacgctgactttccatggactatttgcttcgcgcatcaattgcaaatcttgatttgaaatatcaatgctatacagtttgatctcatcgcggccattttctttcaatgccttgtaagcaccttgagtaaaggcatcccaggtgccccaaatagcatcgatttttccttttggatacttcgccaaaaccgcgcccactttattcgccgtgtctccctgtacgtcagaggagacggcaccgatagattccagctcatgaatgccaggatgctgttttagcagcgcctgataagcggcctggcggcgttccatcggcgggaaaccggcaacccatagcttgataatattggcgttgccgttgaaatctttcactaactggccgaatgattcgttagttaatgaggcgtcatcttgctgcgtgagggtaacgccgggaatattgcctgaaaccgcggtatcaaacacggataccgcgatgccactggcggcaatacgtttcaccagttcggtagaatagggatcgcggccttgagacaagataatgccgtcgtatttttggctaatagcctgattgacgaaatcctgaaaacgcgcgtcatccccgttactgaggaaggtatcgactttaaaacccagttttttaccttcttttaatacgccggaaaggaactgagtggtgttgtcatccgaacccaggttgcggatgaccgcaattttaatttgtccctgatgattagcgatagcgtttggcaccggcgccaatgtcgtgctttcggcggcaaaaagcggcagggtgataagcaggctcaaagccagcaaagggggggcaattttcttcatcaggggctccgttgtgatgttggtaatgtgtgcaagcaaagggtaattgattttgtttttatggctacctttacgtctggacgtccagatggtgttttgcatcataaccaattattttttgataaggaattaactttgttatgaatttttggatttatttatatcttttagtttggcagcagtcgtcacgccgtttgcagcaattctgttagaaaaaggcatatcggcggaaagctaaaaaccagctgaaaagcgaggttagtcgactatcggaaaaggtgatgaatgggtactgcgatatctattaaggatcgcagaacagagaaaaaccttgtgaataacaatgttgttttggttttccaataagtacctattgatagcactgcattttttctatttttgaattatctacggtattattggtcagatattgacgtaaagtttatgtgatgttcattaagtgaattaaataaataaaaactaaacagtagttaaacaaaatggcttatgccagcctcctgttagtcaataaaaatagacagcgctaagggaatagaagtcaccatgggtaaagttagcaagctattcaatcggtctggagccgataaccattcgatatttaactatactgatgcaggaaacttctactcgggtttgagtgataacttatctttctactctatgtcgcgtggagagttttttattgtttttatgcgctatatattggtgcaaccgttgctgctgattttgctggatgtgttatggccagagcagtttgatgatttaatcgttatttccgtacagtcgtggccagcgctcttgtctttggtgctgctgatgccgtgctactaccgcctaagatcacagggtttaagtccctacctgctcctggtgcatttgtttccactgattagctatcttcctcaaaatatgtttacgctgcctttatgcggcgcatttatactttatctgttatttatcaatatttatccgggttatcatttggactgtgagcggaaaacagaactgaagaatgagcaaccaggagaatatccatttggattgacgtttgtttgttttttagtcttgaatttattaccctttctttatttggatatggatgacgccgccattttgttaattatggtttcgtggatctctttcctgttaaccaagtttcactggccagttgtggtgataaatattgttggttctgtgggtgtttttcttttcctcagctctgatttctcagatttgaagcatcataagaatattattattaatgcggtgataaaaatatcactgttggattcagtgttatttctgatgttttccctcagcctgttcctgaatatgttgttctggctggaagagtaccagcgggataaagggaaagtggtgaagcaatagcgagagtaataatactctttatttcaataggataaaaaaatgccggtcaggtttcccctccggcatttttatttcttgccagccacactaacccggctggcaaactcagaacttatttaacctgcataccaggctgagcgccgctgtctgggctaagcaggaagatatctttcccacctgggcctgcggccatcaccataccttcggaaataccgaagcgcattttgcgtggagccagattagctaccatgacggtcaagcggccttctaacgctttaggatcgggataagcggagcgaataccagagaatacctggcgagtttcaccgccaagatccagagtcagtttcagcagcttatcggaaccttcaacgaaatcagcttgtttgatcagcgcgatacgcatatcaactttggcaaaatcatcgaaattaatagtgtcctgaataggatcatctgccaacgggccagtaacgacggcggcgggtgccagattttctttagaatcgccaaccatctcgtttactttatccagatcgattcggttaaacagcgctttaaacggactaatctgatgatttagcaacggttgctcaatactattccaggtcagttcggtattgaggaaggcctcagtacgttcagtcagcgcgggcagcacgggtttcaggtaagtcatcaacacgcggaacaggttaatgcccatagagcaaatagcctgtagatcggcatcgcggccttcctgcttcgcgactacccaaggtgcttgctcatccacatagcggttagccacgtcagccagcgccatgatttcgcgaatggctcgaccgctttcacggctgttgtaagcctcggcgatagatgctgctgcatcgataaaggtctgatatagctcaggatcggccagtttatcggctaatttaccgtcgaaacgtttattgataaaaccggcgttacgtgaggccagattcaccactttattcacgatatcggcattcacgcgctgtacgaagtcttccagattcaaatcgatatcatcgatgcgtgaagacagtttcgccgcgtagtaatagcgcaggcaatcggcatccagatgtttcaggtaggtgcccgctttaataaaggtgccgcgagacttcgacattttagcgccgttaaccgtgacataaccgtgtacaaacaggttagttggtttgcggaagttactgccttccagcatggccggccagaacaggctgtggaagtaaacgatgtctttaccgataaagtggtacagctcggtggtggagtcttcacgccagaattcatcgaaatccaaatcgccgcgtttgtcgcacagattcttaaatgaacccatataaccgataggcgcatccagccacacatagaaatatttacccggcgcgtccggtacttcaaaaccgaagtaaggtgcatcgcgggagatatcccattgttgcagaccggaatcgaaccattcctgcattttgtttgccacttgttcttgcagtgcaccggagcgagtccaggcctgaagcatttcgctgaatgcaggcaaatcgaagaagaaatgttcggattcacgcattaccggcgtagcgccggaaacggcagatttcggctcgataagttcagtcgggctgtaggtcgcgccgcagacttcacagttatcgccgtattgatccggagctttacacttcggacaggtaccttttacaaagcgatccggcaggaacatgcctttctcaggatcgtacagctgagaaatggtgcggttcttaataaagccgttttctttcaaacgacgataaatcaggctcgacagctcgcggttttcatcactgtgagtggagtgatagttgtcgtagctgatgccaaaaccggcgaaatcctgttggtgttcctggctcatctccgcgatcatttgctcaggttcaacgcccaattgctgtgctttcagcatgattggcgtgccgtgggcatcatccgcacaaatgaaatgaacctcattgccgcgcattcgctggaaacggacccagatatcagcctggatgtgctcgagcatatgaccgagatgaatagaaccgttagcgtatggtagcgcgcacgtcaccaataattttttcgcgacttgagccatagtaggaaattgctttctgtaataggaataaggggtctttgatgttaaccgattcggccggttgtcgctagggtcagcggacgactggcggcgcttaagtcaaatcagcgggctttgacgcagtttttctttatgaactccacgcgattagccgagttctgatatgctaaagcttattgtctttaggttaataacgataaattcaaggagccgggatgagcccaaaatcccccgagcagaccacccctgacctgctgcaatctcaagtttccaaggtgcttaccaccttcacccatccgacgctgcaaaaagacctgatcaccctgcgcgctttgcatcactgtgcgctgttggataatgtgctgcatatcgaactgattatgcctttcgcctggcaatacggatttgaaacgctgaaagaaaccgtcagcggtgagctattacagctaaccggtgccaaggcgatcgactggaagttatcgcacaatattacgacgctgcgccgtgccaacgatcagccgggggtaaaaggcgtgcgtaatatcgtcgccgtcagttccggtaaaggcggggtagggaagtcgagtaccgcggttaatctggccttagcgctaattggggaaggcgctaaagtgggcattctggatgcggatatttatggcccgtcgattccaaacatgctgggtacgatgaatgagcgcccaacttcgccggatggcaagcacatgtcgccgatccaggctcatgggctggccactaactctattggttatttggtgacagacgaaaacgccatggtgtggcgcgggccgatggccagtaaagcgctgatgcagatgttgcaggatacgctgtggccggatctggattacctggtgatcgatatgcctccgggcaccggcgatattcaactgacgctttcgcagaatattccggttaccggcgcgctggtcgtaaccacgccgcaggatattgccctgatcgatgcgatgaaaggcattgtgatgtttgaaaaagtgaatgtgccggtgctgggtattatcgaaaacatgagcatgcatatttgcagcaactgcggtcatctggagccaatattcggcaccggtggggcagagaaactggccgaaaaatatcactgcaagctattggggcaaattccactgcatatctctttgcgtgaagatttggatcgcggcgaaccgacggttatcagtcagcctgacagcgagtttaccgatatttatcgccaacttgcttcaaacgtggcggcagaaatgtactggcaaggtgaagccatcccgacggaaatttctttccgcgcgctataagatcttccctagagccaaaatggcctgtccgtgccttacgcgcaggccatttattctttcagccaggttttagccttaaaattctgctgccaatgggcttatttccccattctgccaaataattcacctatctggcctgcattgctacgccttagcgctggcgtcatgccagtgaactccttataattggcgcgttcttagcacccccgtgctttgccccccttcacactacgtaatcaggtctttaattttatgactgacaaggcacatcagtgcgtcattatcgggattgccggcgcatctgcctccgggaagagtcttattgccagcacgctgtatcgcgaattgcgtgaacaggttggcgatcaacatattggtgttattccagaagatagctactacaaagatcaaagccacctgtcgatggaagagcgtgttaaaaccaactatgaccatcccaacgctatggatcacaatctgctgctacagcatttgcaatcgctgaaagcgggcaccgcgattgaattgccgctgtatagctatactgaacatacgcgtaaagaagaaaccgttcgtctcgaaccgaaaaaagtgattattctggaaggcattttgttgctaactgatattcgcctacgtcaggaaatgaacttctctattttcgtcgatactccgctggatatctgtctgatgcgacgaatgaagcgtgacgtgaacgaacgcggtcgctccatggaatcggtgatggcgcagtaccagaaaaccgtgcgtccaatgttcttgcagtttatcgaaccttccaagcagtacgctgacattatcgtaccgcgcggcggcaaaaaccgtattgccattgatattctgaaagccaaacttagccagttcttcgagtgatatccgtctggatctttgctcttttctatggcagtttttgtaacatacgaatttaaatggagatttgatcgatgagactgtgcgatcgtgatatagaagcgtggttggataatggcaagctggttatcactccacgtccgccggtagaacggatcaacggcgctacagtcgatgttcgcttgggcaaccaattccgcgtatttcgcggtcatacggcggcatttatcgatttaagcggcccgaaagatgaagtcagtgaagcgctggatagagtcatgagcgatgagattatcttgccggaaggtgaggcattcttcttgcatccaggtgagctggcgctggccgtaacccacgaatcagtcactattcccgatgatttggtcggttggctggacgggcgttcctctttggctcgtttagggttgatggttcacgttaccgctcaccgaatcgatcccggctggcaagggcgtattgtgctggagttctataattccggtaagctgccgctggcactgcgtccggggatgttgattggcgcactgagcttcgagccgttatctggcccggcagcgcgcccgtataacagccgtcaggatgcaaaatatcgtggtcagcaaggggcggttgccagtcgtatcgataaagactaagtcgcgttagcctgtattcctgtttggacaagaggacgtcatgagaagattactgacaacgttagccatcttgctggtggtattagtcgcggggatgagcgcgctggtacttctggttaatccgaatgactttcgtgcctatatggtcaaacaggtcgaaaaaaataacggttaccgactggcactggaaggggatatgcgttggcacgtatggccgcgcttaagcattatttctggccgaatgtcactcacagcacccggtgctgatgcgccggttgtcagtgcagaaaatatgcggctggatgtcaaactctggccgctactctctcatcagctagcggtaaaacaggtgatgttgaaaggtgctgtggttcgcctaacgcctgatagcgaagcccgtttacagccagatgcccctgtggctccggcgggaaatgcgccggtaacggaaagcacatcctggaagctggatattgataaggtgcaggtggccgatagcctgctgatctggcagcgagatgctgaccaaattaatgttcgcgatatcaatttattactcgagcaaggcccgcaacgtcaggtaaaagtcaacctgagcagccgggttaaccgcaatcagcgagatctgacattctcccttgacgccgacgtggatatgcaaaattatccgcaacatatgggcgcgaaagtcagccagtttacttacaaactggatggtgccgacgttccggttggcgggattgctgggcaaggttcgctggtggcgacctaccagcaaaataaccagcaggtcagcattgagcagcttaacgttagtgccaataataatgtgctaaccggcagcgttcaggcgcggttgggctttattcctcactatgatctggatctgaaaagcgacagtctcaatctggatcaactgtttggctggcaggcaaaaagcgcggacacttcctcatctgccagcagcagcaaacctttggtagccgcagcgccggttattgccagtcaggaaaccgacgtgggtcgggatttacaagggctgcgtgatttcactgccaaactggcattaaccgcgaccaatctggtttatcgcggaattagcgtgaatcaatttaacgtgctggcggataatcagcagggaaaactgtcggtgagccgtctgtccggtcaggcattaaagggtgagttttctttccccggcactttggatgtcaccggtaagcgcttactcattgctgttgaaccaaccattaatcatgtggatctggggccggtgttacaggctgcggaattgccattggtcctgactgggcaattctcgatgactggtcagttatccggcgaagggtttggcgtggagtcctttagccgccgttggaacggcgatgcgaaactttcaatggccaatgcccaactgcacggcattaatatccagcagctaatacagcaggcggtcacgcgtagcactagcgacgtgaccgcggcggagcgtcttgaacgctataccgaagtcagtcgtctacagactcaattggcactcaataaaggtttattgaaagtcagcgagctgaacgcggattcggctctgatttcgctaaaaggcaatggttcgctgaacttaccggggcaacaagccgatatgaatttggcggtccgtgttattcagggctggaatggtcaggataagctggttaaaacgctgcaaaataccgatattccgctgcgtatttacggcccgtgggcgagtttgaaatatcagttagacgtagagcagttactgcgcaaagaattgcagcaacgagcgaaaagcgctctcaatgaatgggcggagcgtaataaagataagcgcaacggtcaggatttgaaaaagttgctggataaactgtaattacatttcgggttggcagtggggaatccggctgccagcctattttggttgataaattgttattttattgtttgtacctctaacgtttttcccccttaaagctagacttctcatcacagattccctcttctgtataaaatccctgcttatccttgatagatgtcataaactcgcggactgactttaggcagagtgcagaacgtatttttgtccaattcacgaagaaaataatacccggatgcgctaagttccggcctgtatcgggtaagagaggattaatgttggatctattgattggggtggttgtggcggtaggcgttggccgctatatcattaagggctattcagctactggggtgctgatggtcggtggtttactgttgctgataatcagcgcactgatgggaaaaagcgtgttaccggccagcgccacgtcaaccggctggcgggctactgacattgttgagtatgtcaaaatcctgttgatgagccgcggtggcgatctcggcatgatgatcatgatgctgtgcgggtttgctgcctacatgacgcacattggtgccaatgatgtggtggtgaagattgcctccaagccgctgcaaatgattaactcgccgtatttgttaatggtcgccgcgtatattgtggcttgcctgatgtcactggcggtttcttcagctaccgggctgggcgtattactgatggcaaccttgttcccggttatggtgaacgtgggcattagccgtggcgccgcagcggcaatttgcgcctcgccggcggcgattattctggctcctacttctggtgacgtcgtgctggcggcaaaagcatcggaaatgccactggttgatttcgcttttaaaacgactttgccaatctctatcgccgcgattgtttgtatggcgatagcgcatttcttctggcaacgttacctggataataaaagtcaggaaaagcatgaaatgatggatgtgaatgagatcacaaccaatgcgccgagcttttatgccattttaccctttacgccgattattggcgtgctgatttttgacggaaaatggggaccagagctacacattattaccgttctggtgatttgtatgttgttggccgcggttattgaatttgtgcgcagtttcagcgctaaaacggtattcgccggtctggaagtggcctatcgcggaatggcggacgcttttgccaccgtcgtaatgctgttggtggcggcgggcgtatttgctcaagggctgagtacggttggtttcatcagtgggctgattggactagctcaatcctttgggactggcggcatagtgatgatgctggtgctggtcactattaccatgctggcggcaatgactactggctcaggtaatgcacctttctatgccttcgtcgagctgatcccgaaactggcggctcaaatggggataaacccagcctatctggttatcccgatgctacaggcgtcaaacctgggacgcaccttgtcaccggtttctggcgtagtggttgcggttgcggggatggcgaaaatatcaccgtttgaagtggtaaaacgtacttcagtaccggttctggtcggattggtggtggttatcgtggcgaccgaaattctggttccactgcgttaagacttaaatagattaagcagttagacagggtgttaaatggatagcgtcaggcataatacgtcagagcctgacgctatcggcagtttcatttcttatacttcgtcgtccggttccggcactttcagcggagtaattttcacttttagaatccggtggctgctcacttcctgcggctcaaacagataatccccgatctgcaattgctcaccgacctgaggaatacgctgggtgtgttccatcaataatcccgccagcgtgtgatattcccttttttcatcaataggtaagggtaaatacatcaccaaatcctcgagcggcatataaccgttggcaatccaggtaccgtcatcgatttgctgaatatcatgacgagcatccggtacttcaccggctaccggcagattaccagcgatggtttccatcacgtcggttaatgtcactacgccttcaatggatccaaactcatcaaccacaaacgcgaaatgggtttgcgcctgacggaactgctccaaagccattagcagtgaaacttgctcagggaaaatcagcggctgacgaatcagtgcgcgtaaatccagtttctcttgcgaaagctgctgttttaataggtcaataacgtgtacgacccctaaaggctcgtcggtggtgctatcttcggtcaccacaattcgggtatgcagatttttagtcagcagagcagttagtttttccggtggatcgttcagatccagatattccacgtcgtggcgtgaagtcatgatgctgctgaccgttcgctgagctagtcccaatacgcgctcgatcatgcgccgttcctgctggttaaagacttcctgattttggcgcccttgatctgcaatcaggctggcggtgtggttatccagcccggcttcttcatgtttaccactcaagatccgcagtaccgcttctgcggttcgttcacgcagaggacgcgccgaggtgaggaaacgacggcggttaaactgcgcgaactgattcagtgattcaataattactgagaaaccaatagctgcatacaggtagcctttcggaatatgatagccaaaaccttctgcgactaagctaaagccgatcatcagcaggaagcttaaacacaaaataacaatggttggatgcgcgttaacaaaacgagtcaatggcttgctggccaatagcatcatgccgatagcaatgattacggccgccatcatgaccgccaaatggtcaaccattccgaccgcggtgatgacagaatccaatgagaaaatggcatccagcaccacgatctgcgccactaccggccagaattttgcggttttacgctgattattttgctggtgatctttaccttccagccgttcatttagctccatagtggctttgaacagcaggaaaatccccccaatcagcatgatcaagtctctggcgctgaaagggtgctcggcaagagtcaccagcggtgcagtgagcgtcgccagccaagagatgcaggccagcagtaccaaacgcatcgctaaagcgcaaagcagcccggtgactcgtgctttatcccgaagatgacgggggagtttatctgccaaaatggctataaagatgaggttatcaatgcctaatacaatttctagcacgattagcgttgccaatccggcccaaattgttggatccatgatccattccatatgcccagtttcaccttctatttctacggcttatgccgcagtcagaataatgggcgctgatcgggtaaaattcaactctcaatagcctcggggccaagaactgcgggggaattgaccgaagtgatgagtcattatccgaaaattagacaggtatatcgtaatgaggctgagattatcctaaggtaaagttaattagtgggttagcctattgtttacatgatctagaatgaacttaataagcaacatggttttatcggtgacagatgcaaaaaaaatgacgatagataccttgcttgctaatatatggcggataaatatagagtgatttttactcatccatttatctgatttgtaatagattgagatacatttttgctgtggaactgacctgtttaggcatacattctcactcttgctaaaaatgtgccaccgcactgaatttaactggttgatagctcgccgcagtaggttgtctgagaataaggtagggcagatgaagaagaatttgaaggctgtaattcctgtggctggtcttggcactcgaatgttgccagcgaccaaggcaattccgaaagaaatgttgccggtcgtggataaaccattgattcaatatatcgtgaatgaatgcgtagccgccggaattaaagatatcgttctggtcagtcactcatcgaaaaatgcgatagaaaaccattttgatacctcatttgagctagaagttacgctagagtcacgagtaaaacgacagttacttaatgaagtgcaaaatatttgcccgccggatgtcacaattatgcaagtgcgtcaggggcaggccaaagggctggggcacgcagtgctgtgcgcgcagccaatggtcggtgattcgccttttattgtgctcttgccggatgtgttactggatgattctactgccgacctgtcgcgggaaaacctggccagcatgattaagcgttttgaggaaaccggccatagccagattatggtggagcctgttccgcagcaagatgtgtctaaatacggcattgcagattgcggtaacgtgaaactgcagccgggcgacagtagtctgatggccgccgtagtcgaaaagccaagcgtggcggaagcgccgtcaaatctggcggtcgttgggcgttatgtgttgtccgcggatatctggccactgctaaagaaaacgccgagcggagcgggcggcgaaattcagctgaccgatgctattgctatgctgatggagcagcaaccggtagaagcattccatatgacgggcaaatcccatgattgcggcgataaacttggttatatgaaagcttttgtggcctacggtgttcgccatgatacagaaggcgaaaaattctctgcctggttaaaacagcaaatagacgcataacgcagaatccgcgcgtaatttttgaataacaggctttatttgcatgaaaactcgttaggtgaatatgactaaattaaaagcagtcatcccggttgccggcttaggtatgagaatgctgccagcaaccaaagccattccaaaagaaatgctgccaatcgttgataagccgctgattcaacacgttgttaacgaatgtgttgccgcaggtatcaccgatattattttgatcacacattcctcaaaaaatgccatagaaaaccattttgatacttcctacgaattggaggcgatgctggaagctcgagtgaagcgccagctgctggaggatgtgcaatctatctgcccgccgggtgtaaccattatgcatattcgtcagggtcacccggaaggactcggccacgcagtgctgtgtgctaagccgctgatcgacggtcaacctttcgtggttctgctgcctgacgtcctcattgatgacgctaagtctgatttgaccaaagataatctggctcagatgataacgcgttttgaagataccggcgcaagtcaggtgctggttcagccaatgtctgttgaagagctgccaaactactcggtcattacctgcgaagcgccggggctggctccgggtgaggcaagcccgatagtggatatgcaagaaaagccagaaaatctgaccggaatgaagtcaaacctgtcagcggttggccgttacgttctttccgccgatatctggccactgttagagaaaaccgaaccgggtgcctggggacgtattcagctgactgatgctattgctgcgttgaatgctctacaaccggtggatgcggtagcgttgaccggtcaggcttataactgtggcgaaaaactgggttatatgcaggcctatgttgcttacggtttgcgtcatccggttcagggggatgagttcaaggcctggttaaaggattttgtgtcttaatccgctgaaatgatcgtaaatcaggcaaccgttaggttgccttttcttttgggacggcgattattttgcctcaggcaaacgactgcgtacagcaactggccggttgtgctgtctatcgcaccaatcactacccacctgacataatcctgagttaacatgtttcccactgcaaaaacctgcgggcttatcggccaatcgcgggtgtcatcctttagacaggagtttttttaatgtccaaacaacagatcggcgttgtcggtatggcggtaatgggccgtaacctggcgcttaacatcgaaagccgcggctattccgtttccatctttaaccgttcatcagataaaaccgacgaagtggttgctgaaaacccaggaaaaaatctggtgccgagttataccgttgaagagtttgtggattcactggaaaaaccgcgtcgtattttgctgatggtgaaagcaggtgaagctactgacaaaactatcgcgtcgctgactcctcacctcgataaaggtgacattttgatcgacggcggtaatacctattacaaagacaccattcgtcgtaaccgcgaactgtctgagcagggctttaacttcatcggtaccggcgtgtccggcggtgaagagggtgccctgaaaggcccttcaattatgcctggcggtcagaaagaagcttatgaactggttgctccaattctggaaaaaattgccgctcgtgctgatgacggcgaagcctgcgtagcttatatcggcgctgacggtgctggtcactatgtgaaaatggtgcacaacggtatcgaatatggcgatatgcagctgatcgctgaagcttattctctgctgaaacaagcgctgggtctgaataatgaagaactggctgcgactttctccgaatggaataagggcgagctgaatagctacctgattgacatcacaaaagatatcttcaccaagaaagatgaagaaggtaaatatctggttgatgtgattctggatgaagccgcaaacaaaggtaccggtaagtggaccagccagagttctctggatctgggtgaacctttgactctgatcaccgagtccgtctttgctcgttacctttcttccctgaaagatcaacgtgttgctgcatctaaagtgttgaccggcccaacggttaaagctttcgaaggtaataaagcagagtttatcgaaaaagttcgccgcgcgctgtatctgggtaaaattgtttcttacgctcagggcttctctcagctgaaagcggcttccgacgagaataactgggatctgcactacggtgagattgctaagatcttccgcgctggctgtatcattcgcgcgcaattcctgcaaaaaatcaccgatgcttatgcagataatcctaagattgcaaacctgctgttggctccttacttcaaacagatcgctgatgaatatcagcaagcgctgcgtgacgttgcgtcttatgcggttcagaacggcatcccaacgcctaccttctctgctgcaatcaactactacgacagctatcgttctgccgtactgcctgccaacctgattcaggcgcagcgcgactacttcggtgcgcatacttacaaacgcactgataaagaaggcgttttccacactgagtggatggaataattgcttagtttagcgatataagcgtgaatgcatgatatttggcagcgcccatcattgtaactgataatccgttagcctgatgatgtgagctgcccgtaatagaacgtttcttgcaaactatgccttaatctgtaacagcaatagccagatttcgctaacgaatagatagttctaatgatgtattgaccagatctgtcgtaataaacagccctcgcagattaaaatgtgagggcttttttacgtcgaaatgccattgataacgggaaggctatttctcgtggcgttcccgtaggcggccgatcactttactgagatccaaattctgatcttgcagcagaaccagcaaatgataaatcagatcggacgcttcattcgtcagttcttctcgatcgtttaccgttgccgctagcgcggtttctacaccttcttccccaactttctgggcgatacgcttggtgccgctggcgtagaggctggcggtataagaactttcaggatcggcgtttttacgttcagctagcaattgttcgagctgatacaggaaaccccagtcgctagctgccggcgaaaagcagctgttattgcctaaatggcaggttgggccaatcggattcactaaaatcaagagggtatcgttatcgcagtcagggtagatattgactacgttgaggaaatggccagagctttcgcctttagtccatagacgctgtttggtgcgggagtaaaaggtgactttgcctgatttctccgttgctgccagcgcttcccgattcatgtatcccatcatcagaacttcaccggagacggcatgctgaacgatagcgggcatcatgttatcgacttttttccaatctagctggttgatctgttgttcagttaacacactcttatctccacgccttgttcagacaaataggtttttaactcgccaatattaatgatctgtttatggaataccgatgctgctaaagcgccatcgacgtccgcatcgcggaaggcttgcaggaaatgttccggcgtacccgcgccgccggatgcgatcaagggtacacggcaaatggcgcgcatttgtttgagctgacgtaagtcatagccgttgcgtactccatcctgattcatcatattcagaacaatttcaccggcgccgcgtaactgtacttcacgaatccagtcttcggtttgccaggtggtggctttggtgcgtttttcatcgccggtaaattgataaacctgataactatcgctttcggcgtcgtaccaggtatcaatcccgacgacgatgcactgtacgccatagcgttcggccaaacgagtgatcaaggttggatcggccagagccggagaattgatagagatcttatctgcgccgtaagtcaggatctggccagcatcctcgacgctcttaataccaccagcaacgcaaaaaggaatatcgatcacttcggcaacgcgagctacccagcttttatccacgacccgaccatcggatgatgcggtgatatcataaaacaccagttcatctgcgccttctgcggcgtaacgctgtgccagaggaacgatatcgccgatgatttcatggttgcgaaactgaacgcctttgacaacctgcccgtctttcacatccagacagggaattatgcgttttgccagcatgcgatcgcctccttcacattaaatttaccgtctagtaaggcgcggcctacaataacgccttgtactccgctggagcgtagtctggcaatatcgtccagacagccaatcccaccagaggcttgaaaagccacttgtggatagctggcgcagacttcctgatacagttcgacgttagaacctgccagcgtgccgtcgcgagatatatcggtgcaaaggacgtgtttcagaccaaaaggcaggtattgttcgataatttgttctagtgtgacgttggagttttcctgccagccgctgatagctacttctttacggccggttttatcaatacgcacatccaacgccaggacaatcgcatcggctccgtaacgttcaaaccagctctgtaccaactctggctgcctgaccgccgttgaaccaatcaccacgcgggtggcgccagccttcaacaaggctgctacatcctgttcattacgaatgccgccgccgacctgcaccggtacttctacgccggccagtagctcacgtaataatgggatctggcgggccgcaggatctttagctccggttaagtcgaccagatgtaaaacctgcgcgccttgctgctgataatcctgtaaacgcggcaatgggtgattgccgtaatcgcgctgttggccgtagtcgccctgatgcaaacgcaccactttgccttcgatcaaatccaaagcgggaataatcatggtgcctacatctccaaaaagtttttcagcaattgtgcgcctgctgcacccgaacgttccggatgaaactgcacgccaaagaagttgtctttttcaaccgcggcggtaaacggctcgccgtagttggcctgggcgatggtatttggacatattggcatcgcatatccgtggacaaaatagaagtaggtgccatcggcaatgccgcggaacagatgattacctgcctgagcagaaatctgattccaacccatatgcggtagcggtaagccaaaatcggtcatgagttttaccggtgcatcgatgatacccaaggtgtcgataccgccgctttcttcactgtggctagccaaaagctgcatgcccagacaaatccccagaaccggctgagtacaggctttaatcaactcgatcagttctcgctctttgagctgttccatggcggcatgggcggtacctacgccgggcaaaaacagcttatcggctcgtagtgcgatgtccggatcgcggctaatgaccggttcatagcccaaacgttgaacggcgtaggtcacggaggagagattggcgcatccggtgtccagaatgaccacgttcattacagcactcctttcgagcttggcagcgtattgccttcgacgcgaatggcctgacgcagcgtgcggccaaagaccttaaacaaactctcaactcggtggtgatcgttgcgacctttggttttcaggtgcagggtacaggccatggcgtaagacagcgaacggaagaagtgctcaaccatttcggtgcttaaatccccaacgcgctgataattaaattcggctttatattccagatgcgggcggcctgagatatccagtgcgcagcgcgccagacattcgtccatcggtagtacaaaaccgaaacggccaataccacgtttgtcacccagcgcactgttaatggcttcacctagcgctaatgcggtgtcttccacggtgtggtgatcgtcgatataaagatcgccgctaacctgaatatccatacggaatccgccgtgggtggctatctgatccaacatatgatcgaagaaacctacgccagttttgattttgctgccaccttcccgatccagccacacgttcacatcaatggccgtttctttggtcacgcggttaacgtgagcgtggcgatctcgctgagtcaactgtttggctatctgtgaccagttcagaccatcacgttgatagcgcagtccactgatgcccatattttcggccagctgtagatcggtttctctatcgccaatcacatagctattggctccgttcatcacgccgtcggtcaaatagttttctaccagtgccgtcttaggcttgcgacaggcgcagttatctgccgggaggtgcggacaaattaagacgtcttcgaagtggatgccttgggaagtaaaaatctgcatcatcaaactgtgcggcggatcgaaggattcctgagggaaactgtccgttcccagtccatcctgattagtgatcatcaccagtttgtaaccggctttttgcagagccagcagagcaggtatcacttccggttccagcgccagtttatccagccgatcaacctgatagtcttctggcggttcagcaatcagggtgccgtcgcggtcaataaaaagaaatttctggctcataacgttcccttcaaaggctggatgatgatgtattggttgcattggggctatttataccgggtaaagtggctagggctgaaataacccgttcgcattcctgacgagtgccgatagtgatacgcaggcacccagacaatcccggctgtttattctggtctctcaggataataccttgatcccacaagcttttaaacacgctactggaagcagaaaatcgtgccagaacatagttggtttcactggtaaacacctgttctacgcagtcgcaattttgcaattcgccgatgaaccattcgcgagttgttcgtatctcggccactcgctggcgcatggtggcgataccttgcggactcagtgcctgcgctgcgatatccgccaccggagtggaaagcggataaggagcaatcactttaagtagcagctggataatatcgttgttagctagcgtaaagccacagcgtaaaccggctaaagcaaaagctttagatagcgtgcgcaaaatcactaaattcggataatcttttaaccattcgctgacgctagcctgcgggcaaaactcgatataagcctcatctatcgccaccacagcgcggtctttggccaactccagtacctgacgcaagtcctgttgattaatcaggttgccggtgggattgtttgggctacagacataaaggacttttacgccatctagactgtcggcaatcgccggtaagtccaactgccagtcttctttagcgggtacggtacgccgttctacgccaaaggtttctgcgctgaccgaatacatgccataggtcggtgggcaaaataaaatggcatcctgacccggttcgcaaaaggcacgaatcaacagttcgataccttcgtctgcgcctcggctgaccaagacttgatcggccgctatgcctgcataatcggcatagcgttcaatgacttgcttaggctgacattctgggtaacggttaaaggtttgcgccgttaaggtaaagttcggcgcttgcggatattcgttggcgtttagccatacatcgccgttaccgcccagtcggcgcgcagacatataaggagtcagctcgcgcacattggcgcgggccagttcgataatagacgcactcattttgactcctttttaatggcgttaagggcggtaactcgcagggtaacggcatttttatgggccgttaactgttcagcctgcgccagagtttcaatggtcggcgctaaatccagtaaaccttgcggtgttaactgttgcacagtcatgcgttttacgaagtctgccaagcctaaacttgaataagtcgaggtataaccgtaagtcggtaatacgtgattggtgccggaggcgtaatcgccagcggattccggagaccaatcgccaaggaataccgaaccagcgttatcaatcagagcgaccattttttcgggttcacgcgtttgcagaatcaagtgctccggaccgtattggttactgatatcaatacattgctggagatctttggtgacaatcagacgactgctttccagcgcctgacgggcgatagaagaacgagaaagctgagctagctgtttttccacttcaacggcaacggcctgagcaatggcggcatccggagtcagcaaaatcacctgagaatcagggccatgctctgcctgagaaagcaaatctgaagcaacaaaggctggcgtagcgccgctatcggcaatcaccagcacttctgacggacctgcgggcatgtcaatagctgcgccgtcgaggcgttgactaacctgacgtttcgcttccgtgacataggcattgcccggcccgaagattttgtccactttgggtacggattcgctgccaaaagccatggcggcaatagcctgtgcaccgccaagctggaacacttcttcaatgccacaaagctgcgcggcatagagaatttcatcggcaatcggcggcggtgaacatagcactacgcgtttacatccggcgatgcgagctggggttcccaacattaatacggttgaaggcagcggggcagaaccgcctggaatatacaggccgacggaagcgatagggcgcgtgatttgctggcagcgcactcccggctgggtttcgacgtcaaccagcggcgttttttgtgctttatggaaaatttcaatattgcgtaccgcctgcgccattgcctgtttaacatcatccttcagacgtgcggaagcggcggcaatatcggcagcgctgatacgaatatcggctacctgcactttgtcaaaacgctggctgaagtcgcgcagggcgctatcaccctcgcttttcacccgatccaatatctcattcaccgcggcagtaatacgctctgaggcgttgattgccgggcgtgtcagtaacgctttttgctgttctaaactgcattgctgccagtcgatcagagtattgaagttcgtcggctgcatggtttactccatcatcttttcaataggaaggaccaaaatagagctggcgcccagtgcttttagtttctccatggtttcccagaacagggtttcgctactaaccatgtgcatggctacgcggcttttatcaccggccaatggcagaatcgttgggcgttcggcgcctggaagtagggtaatgatttcatccagacgttcgctcggcgcgtgcatcatgatgtatttcgattctcgagcttgaataacgccttgaattcgggtcatcagtcggtcgattagctgctgtttagcttctggcatttcgccatctcgttgaatcaaacaggcttttgaacgataaattacttctacttctcgcagcccgttggcttccaatgttgcaccggtagagactaaatcgcagatggcatcggccagacccgcgcggggagccacttcaacggagccattcagtaaacaggatttaaaacggacgccttgtttatcaaggtattgctttagcaggtgcgggtaagaggtggcaattcggctattttgcaagcattgtgggccgctatattccgcatccagcggggtcgccagagacaggcggcaagtaccaaaatccaggcggcgcagggtaaagtaacgaggatcttccccttgggcgcggcggttaagtaattcttcttccagtacgttttcgccaataatgcccaaatcgactacgccgtccataaccagaccggggatatcgtcatcgcgaacgcgcaggatatcgataggcatgttctctgcgaaggcaatcaggcgctgttgttgcaggttgattttgataccgcagcgtgacagcagttcttgggaatcttcgctcaggcggcctgatttctgcattgcgatacgtaaacgtgttttatctaacatggtaaacctcataacttattcatttaaattcaaaagttttgggcaacaaaaaagccctcggaagatgatcttccgagggctttctttaatgcgttcttacgccacctggaagattcgttaaccgtcttccagcacacatcggcctgtcagactagtcaggatgatggtgatgatggtgattaaattgaacgcgattcataatggtttctcacttggggttatggactcgctgccgataaccagaatttgtaaagtatcgtttgctctgtcaatcaacctaaactatctgatgatgtgaaagcaatctttttttattaagatgattttatttcacgcatgataacccatgtggttcggggctatcctcttattcagatgaatcattgctggcgtggaatttgtaagccgtatatttagcttgttacgccttggtattatcctgatttgagggtaatttggcatgatgaatggaagacgactcggccgtagcccaatggcttaggagcctgagccatgagtttttactgcacaggcaggagagcagattgatgaaaaaggtcgctatcataggtttaggctggttgggaatgccgttggcccagtccttgctgcggcgtggcattcaggtggtagggagcaaaacaacgcctgacggtgtagatgcagcccgcatgagcggtattgagtgttatcagttggttctgacgccggagctgatttgtgatccggaagatttaccacatcttttcgatgctgacgccttggtcgtgaccttgcccgctagccgcaccgcagaggggggcgaaaactattttctggcggtgcagcaggtggttgatagtgctctggtttatggtattccacgcattattttcaccagttccacctcggtttatggagataccgttggaaaagtgaaagaagattcgccgctgaatccggtttcggtggcggggaaaacgctggtggaattagagcaatggctgcatcgattgccccatacttctgttgatattcttcggcttgccggattggtgggcaatgaacgtcatccggggcgtttcctggcgggaaaaacgggcgtaaaaggcggttcgcaaggagtgaatctggttcatcaggatgacgtgatcgctgccattgaactgctgctgaagttacccaaaggcggacatacttacaatttatgtgcgcctaagcatccggccaaaaaagatttttaccctgagtttgcccgaacattgcaactcgcaccaccggagtttgctgctgaagaggaagagcagcccagccgtctggttgacggtagccggatatgcagcgaactggggtttgagtacacttatccggatccagaaagaatgccggtaagctagtcgttagtgtgaaacggtgtggggatcggatttcggtttgcagtcgtttggttaatcttgaactggatgatatcaaccgaaatctgatccttttgacagagtaaaattcagcttaatccaatctcgatcacttgcttaaacgccggacgctggctgatttgctgataccaacgtgccagatgcggatggtggctgcgttcgatcggtaaattgaaccaggcataagcgatgcaacccagaggaatgtctccgacaccaaagtgttggccagataaataaggctgtttttccaattcgccgtttgcaatccccatcagagcatcccattcttttatgccctgctgaatcttctgtttatcctgctgttccggcggagttcgtaccaaaccaacaaatgcagctttgaacggagcggctaaagcctgagcccaatccatccatttttctgcgctggcacgctgttggatgtctgctaggtaaagtgtgctcttttcgccgtatttcaatgcaatatagcggacgatcgtgttagattcccacaaaataaagtcgccgtcttgcaggcagggaatcagcccgttagggtttagtgaacggtaatttgggtcgtccagcttgccaaatttgccgccggcatcaatttgctgatattcaatgcccaattcttccagacaccacaatactttttttacgttggtggaattgtttctaccccatactgtcaacattgattcctcacttattgacctgaatgattcggtataatcgaagtgttatcgtcactataagccggtttcatagcctaaagaagtatgattgtgtatcaaatactcaccgtgccaatgagcgatattccattcgttgagaatggcgagatctgccaattggttattgggattgataaccgtcgcgtaatctacaaactccaacattggcctatcgtttattgagtcgctgtagccataagtattggaaaaacagagaggtggcgagtttttcagccactcattgatgcgcgcaaccttaccttcgcgaaaagtgagtacgccgtaggtatctccggtaatccggttatcttccagcgcgacaccaatggccaacgcagtatcggcgcctaattggcgagcaataggtgcgactaaatgctcgccgctggccgagataatcagaatatgatctccccgctgtcgatgccaatccaactgctcctgcgcctgcggatatactcgcggcaaaatttcctgctgaataaaactttcaacccaacctgtcacttcttgtatggaatagccgactagcggagccagcgtggcgtgcatgtaacattccatggaaagctgaccgcgataataatcctgcatcaattcctgttctttttttagcaaagacagcggagcccgttttttcgccactaaccagcgcaaccacaggctggcactgtcttcacaaatcaaggtttcatctaaatcaaataaggccaggtccatggactacctctcaatgcaattatgactgttaaagcgtggcactgtcggggggatgagcctgggccaggaacaaccacagtgacaaagccattaaccgtaaagtaatccggtgaatgaatactgagtagcgcattgaatacaccacctaagagtaaacgaaaccgctgtttcctatggcttaggtaatgggttacggcaaaagatttgctgtcttcaatctgtccttcggcggaaaaagagacaaagaataagtcaaaaatgtgaccgtttaatggcgaaaagcggcatttcgaaggattttcacggatattctttactctttccgcgcacatcattcgccgtgaaagaaataacatagaacctaaagatattggtggcgggcagattttgcgtgttaattgtatatatcgtttggatatagattgttaagtagatagacgagaatgctcttaatgagaggcgatttttactccacaagaaccttgtcgtcagtctgttttccccacagcttaggagcagattatgtttgttattcgtttgtattgttgtccggtattcatgggttctgagcaggataaaacgcggaataatcatactatcggagtaaaaaatgagtcgccaaccaacctcttaccgtctacctcttctggatctgtctcagcttaagcgcggagaaacgcagcgccaggcatttttgaccgaattacgccatgctgcgcgagatattggctttttctacctgaccggacacggagtcgatcccgagctgtcacggcaaattcagaacctttcccgacgtttctttaacttacccaccgccgataaactggcggtggagatggtgcattcccctcattttcgcggatataaccgagccgcttcggagctgacccgcgggcaaccagactggcgcgaacagtttgatatcggcgcggagcgttcacctttggaactgcgtccggaaacgcccggttgggcgcgtttacaggggccaaatcagtggccgccagctttgccggaattgaagcctctattgctacaatggcaagcagagatgactcaaatggcgctgcatttgctacaggcttttgcgctggcgttggaactggacgaacacgcttttgatgagctttatggcgataaacctaatgagcatatcaaactgattcgctatccggggcgggaaactacccaaagcgggcagggggtgggcgctcataaggattcaggcttcctgagtttcttgctacaggatcaccaaaaggggttgcaggttgaggtggaagacggcttatggattgatgccgagccgttggaaaacacttttgttgtcaacatcggtgagttgctggagctggcgaccaacggttatctgcgcgccactgtgcatcgggttgaaacgccgccggcgggtgtcgatcgtctgtctattgcctttttccttggggcgcgtctggatgcagtggtgcccttgtatcagttgcccgaacatttggcggctgaggccaacggtcccgctagcgatccgctcaacccgctatttcgggacgtcggcgttaactatttgaaagggcgcttacgttcccatcctgatgtagctcaacgctactacccggatgtgttagccgctgccgaactaacgatagcttaaccctattgctgataaccgaataaattgcctgaggtaataacgatgaataatacgtttgcaatgggtttcgcgcgtaccgcgctgatcacgacgctggcattttccctttctgctcaagcttatgcggcaaatgccttacgggtggctgccgatccggtgcctcacgccgagattttacagtttgtgcagacattggatccgtcgctgaatctgaaggtgattgaaattccgaacggtgtgaattctaacgaactgttggcacatggcgatgtggatgccaattatttccagcatgcgccttatctccattcacaggaacaggcgctagggcaaaaatttgccatcgtcgcgacggttcacgtggagccgctgggtatttattcccataagtataaaactttcgccgacgtaccggaaaagggcacgatcgccgtacccaataatgttactaacctgagtcgcgctctatatttattacaagatcagggtcttatcacgctaaaagcaggatttaccgatccggctaaacatcaggctacgccgaaggatattgccggtaatcccaagcaattgaaggtgctggaaatagaatcgccgcagattcctcgttcgctggacgatgttgatttggcagtcattaacggaaattacgcgttagaggcggggttaaatccagcgaaagatgcgcttgggctggaaaaagccgctggcaatccttatgccaatattctggtgacgacgcctgccttagaaaatgatcaacgtatcagacagttagttagagatttacagtcgccgcaggtggctaagttcatcgccgaaaagtatgccggatcagtcatccctgtggtcgccgtggacagtaaatcatgatcgccatcgaacggctgagtaaaacctatcagcatgctgggcagccgatggttgccctacaggatatttcgctgacggtgcctaccggttcggtgttcggcatagtggggcgcagcggcgcggggaaaagtaccttaatccgttgcttaaatttgttggagcggcccagttcaggccgtattcagcttgatggccacgaattgaccactcttggtgataaagcgctgcgcgtcgagcgtcagaatattggtatgatttttcaaaatttccatctgctgcactcgcgcaatgtcagcgacaacgtagcggtgccgctggaaattatcggcataggaaaaaccgagcgaaaacggcgagttaccgagctgttggcgttggtcggattattggataaagccgaggcttttccctcccagctttccggcgggcaaaaacagcgggtaggtatcgctagggcgttggcggccaaaccgaattatctgctgtctgacgaagcgaccagcgcgcttgatccggaaactaccgcttctattctggcgttgcttagaaacattaatcagcaattaggtttaaccatagtgctgattacccatgaactggaagtggtgaaatccatctgtcattacgcggcattgatggagaaaggccgagtgattgaaaccggcgctattgcagatttgctggctgatcctgcatcacgccttggaaaatcactgttgccgacctgcggcagcgagctgttgagcggtacgccggtagcggaattgaccttcttcgatacgttattggcttcgccggtgttaagcgcattggcgcatcagcatgcggttggcgtcagattgctgggcggcggcgtagaatctattggcggtcaacgggttgggcgtttgcaggtggattttagtcatccggaaggcgggttaaatctggctgaagtgctgcaatttctaaacgaacgcggcgtgagggcggaattgatatgagtaacggtatggattggcaggaattagtggatttgatcacaaatgccaccggtgagactttgtatatggtgatattggccacgttcttcaccttagtaatcggtttacctttgggtattctgctgtttatatcccgtaaagacggcgtttttcccctatcgcgtatcaatgctttgattggcgcaatcgtgaatctggggcgttccatgccgtttgtggtgctgttgatcgcgttgattccggttacccgctggatcatcggcaccacgctaggcagtacggcggcagtggtgcctattactttaggtgccattcctttttttgcccgcgtagtcgaagcggcattggacgaagtggataaagggcgtatcgaagcgattttatctatgggcggttcggcgtggcacgtcatccagaaggttttactgccggaggctctaccggcgctgttagctggggtgacgttaacggtagtgatgctggtgggattttcttccatggcaggcgtgataggcggcggcggactgggcgatttagccattcgctatggttatcagcgatttaataatgaagtgatggttgccaccttagtggtactggtgattttggttcagggagtacaaagtctgggcgatcgctgggtgaggtctttagcgcatcgacgctaatataacgcgttttaaccactcaaacccataccagcccgcaggccacgcgggctgttgtatttctcttatgctgacaccgcggcgttttatttccaaaatggtcgattatagtcacgcttaatatcactgcggctcataccaatatcccgtagctgggtttcagtgagtctttgcagcgtatgcattgccagccgccgttggttccaatcatacaaagcattccctatttttaggctgaaacgcagtaaaacatttcgccgattttctttatcctgtgattggggtgaatggcatttatccatctgattattaaccatattgctcatagctcgtgactccttatcggtggaatatcagcatgaggctttggctaaaaacattacagatgcaaatagggactattatttccatacagatgtgagataaatgaactgaatggtgagaaattgcgccatctgtactggttatcaattttcaggtggtgctatttgtgacacgttatcaacaattggctgatattctcagcgagcgtattgaacagggtttgtattcttgtggtgaacgtttaccttccgtcagactgctaagcgaggagcacggcgttagcatcagtacggtccagcaggcttatcgttctttggaaaagtgtctattgatagaggccagagccaaatctggctattttgtgcgcgggaatccacgccgtccggaactgcctgcggtttgccgccatgctcagaggccggtagaaatctcgcagtgggaacacacgctggcatttctccatgacagtaccgaagaagacgtattgcatttaggctcaggtacgcccgatagttcaggccccggcttaaaggtgctcagtcggttgcttagccgcatcagtttgcaccaaagtgaagccatcatggcttatggcagtttgcagggaagcctgattttgcgcgagcaaattgcccgcctgatgctggatagcggcaatcaccagtcagcggaaaatattattattaccgccggttgccacggtgctttagcgattgccttgggggcggtatgtcagcctggggatatagtcgccgttgattcacccagctttcatggcgccatgcaaagtctgaaaggcatggggatgaaagtgattgaaatcccaacggatccggtgatcggcattagtctggaagcgttggaaatggcgctggaacagtggccgatcaaagccgttcagcttacccccacctgcaataatccgttgggttacaatatgccggatgggcgtaaaaaagccttactcactttggctcagcgttacgatatcgccattattgaagacgatgtttacggttcgctggcctaccaatatccgcgaccggcgactattgcctcgtttgacgacgatggacgagtgttactgtgcagctcattttccaagacgttggctccggggctgcgcgttggctggattgcgccggggcgctatttagaaaaagcgttacatattaaatacattactgctggtcgaacccctacgttacagcaattggcggtagcggagtttattcgacagggagatttcactcagcacctgcgacggatgcgccgtcagtatcagcaaaatctcgatattatgacccattgggtgaccaaatattttccgcccagcacttgtctgagtcggccgcagggcggttttatgctgtgggtagaactgccggaagggtttgactctttgcgccttaaccgcattttattgcctcacaaagtgcagatcgccgccggttttatcagctcggcgtcggggaaataccgtaattctctgaggctatgttttagcaaaccgatgacggacgaaattgagcaagcggttaaattggtaggaaaaacggtcagtgaaatactggcggaaggttaaaaaaccgattgataaacggcccgatagcaggccgttggtgactgagatctattctggctgggattaacccgccaatgcctgcgctaaatcggcgatcaggtcttcggtatcttcaattccgacggaaagacgtaataactgcggcgtaatgccgtgtttaaggcgaatatccaagggtatcgaagcgtgggtcatgctgtaaggaaggctgattaggctttcaacaccgcccaaactttccgctaacgtaaacagatgagaacgtttaatcacttcgcgggcatactcgggttcgcctttcagccgcacggcgatcatgccgccaaaaccggacatttgctgacgcgccaactgatgctgaggatgacttttcaaccccggataatacaccgcttccacctgcggttgctgttccagccactgagcgatatgcaacgcgctttcattgtggcgtgccatacgcaacgctagagtccgcaggccgcgcagcgtcaggaaactgctgaacggatcgagaatcccgcctaccgcattgtgtaaaaaaccgagttgttccgctaattctgagttatttcctaccgcagcgacaccggctaccacgtccgaatggccgttcagatatttagtggctgaatgcaccacaatatcaaaacccaaatccagcgggcgttggatgtaaggcgaggcaaaggtgttatccgccacgctgattaattgatgttttttagcaattgcggcgatggcggccaaatcagccagttttagtaacggattggtgggcgtttctacccaaatcattttagtatctggttgaatcgcctgttccagcgcggtggtatccgctggtgaaacgtaggttacgcgcaggccagcggtgcgattgcgcactttttccagcaggcgataagtgccgccgtacagatcgtccacggcgacaatatggctgccctgatccaataactctaacaccgtcgaacaagccgccagaccggaggcaaaagcgtagcctcgcgtgccgttttccagctcagcaatggccttttccaacgcgctacgggtcggattgccgctgcgggaatattcgtagccggtatgctctcccggtgcgggttgagcgaaagtggaggtcgcgtaaatcgcgggcatcactgcgccagtgctgtctggggtataaccggcgtgtacagtcagggtgtcaaactttgccataataaggtccttgaaatataaattaagccagtgcctggcggcgggcatttagcacatcggtgcgggtaatcaggccgagaagacgctccccgtccagcacgatagccacatgtccctgatcgaatgtggtgagcaagtcggtgtaactcgcttctttctgtaaggtctttacctgccgcgtcattgcttcgctgaccgctaaattgaaatggcgggcatctttttgcacgctattaagcaaatcccattcgtcaatcaaaccgacgacgcgttcgttttccagtaccggtagttgggaaatatcgtaaagacgcatacgagcatgaactaccgccagcgaatcttgcggtgaaaccgaaacggtagcgccgtcctcgtggctataggtgatgtaatcgcgcagatcgccgtgcttcgggcgagtcagtaaaccctgttccagcagccagtaatcgttaaacattttcgaaagatatttattgccactatcgcaaacgaaggtgacgacgcgtttcggctcggtttgttcctgacaatagcgcagggcagccgctagcagagttccggtggaggaaccggccagcacgccttcttcttgcaacagacggcgggcggtggcaaaggcttccgcatcatcgatttggtaggatttcgtaacctgcgagaaattgctaagggggggaataaaatcttcaccaatgccttccaccagccagctaccggcttctccgatccgatctttcgcgacgtaatccgccaaaatagagcctaacggatcggccagaacaaattgagtattgggggccacttcggcgaaatactggcttaaaccgctaagcgttccgctggaaccaacgccaaccacgatggcatctacctgaccttccatttgttcgaataattctgggccggtggcgttacggtgagccgcagggttggccggattattaaactgatctatataaaacgcgccgggtatttcctgtgacagtcgtagcgcgtaatcctgataataggccggatggcctttacccacgtcggaacgagtcaacagcacctgcgcgcccaatgctcgaagatggaagattttttcctggctcatcttgtccggcactaccagaatcagtttgtacccttttaatgccgcgactaacgctaatcccaaaccggtattacccgcggtggcttcgataatggtaccgcccggctgtaaatcaccgtcacgctctgcctgttcaatcattgatagcgccacgcgatctttaatcgagccaccggggttctggttttccagtttcacaaacagctgacaaggaccagtatcaaagtgcgtgagttccagcaggggagtgtgtccaataagatcgatgactgaacgcgggattgccataactgctccagaagccaaaagaacgggtaaacgatggcgagagcatagcgcctgttacttagtcgctaaaaataacaaataaccctcttatatttcttttggttatataaagtgaggttttaagacgtttgggtgcttagatggaaagccgtacagctatcaagatgtttagccgtgtagccattgaaaacatgaccaagcgtaaataagcgcaaaacatcacccctttgtggtcgttatcggatagatttaaagagggtatgaaattttgactaagctaaagtctctaccctagtgaaaaaacgcgatttttttacgtattgaataacggcttagttctgggaataccgcttatttcctattatttgcaaggatactctggcgacctcatgatgaaatatacaatctcctccaagctaaaaaacgtcactttcagtgccggtttactgttgctggcgttacctgccgtcagagcggcagatgagcaaccggctcctcccattgatgctaaagcttacgtattgatggattacaacagcggcaaaatattggctcagaacaatccggaccagcgtctggatccggccagcctgactaaaatcatgtccagctacgtgattgggcaagcgattaaagcgggcaaagtccatcctgatgatacggttaccgtgggtaaagacgcttgggctaccggtaatccggcattgcgcggttcgtcgttaatgtttttaaaaccgggcgatcaggtcaaattgatggatctgaataaaggcattgttattcaatcaggtaacgatgccagtattgcactggctgattatattgctggcagtcaggacagttttgttggtttgatgaataactacgccaaagctctggggctggataatactcacttcctgacggtacacggcctggatgcggaagggcagtacagtaccgcgcgggatatggcggtattggggcaggcgctgattcgcgacgtaccggaagaatatgcgttacataaagagaaagagtttacctttaacaagattcgtcagatcaaccgtaatcgtctgttgtggaacagcaatcttaacgtcgatggtatgaaaaccggttataccgcaggcgctggccataatctggttgcttcggctaccgatggtcctatgcgtttgatttccgtggtattaggtgctccaagtgacagagtacgttttagcgaaagtgaaaaactgttgagctggggcttccgcttttacgaaaccgtggtgccgattaaaaccgacaaagccttcgtgactcagaaagtctggtttggcgataccggtcaggttgatttgggcgtagcgcaggatgcggctatcaccattccgaaagggcaaatgaaaaacctgaaggccagctataaattagattctaccgagcttcgtgcgcctttggctaaaaatcagaaggttggcgtgatcgatttccagctaaatggtaaaagcatcgaacagcgtccgctggtggtgatgaacgaagtgaaagaagggggcttccttagccgcatctgggactttgtgatgatgaaatttagccaatggttcggcggtatctttggataatcgcgacctaggttaaattcagcgataaaaaaacagggccgcaataaataaatgcagccctgttttattttcagtactaaagcgactatcactataaaactgattcagtataaaaccggttagaagcagaaaaaccgatcagtcgcagggaacgattttaatcgccagcccgccgcgagaagtttcgcgatacttggcgttcatgtccttcccggtttcgtacatggtttcaatgactttatccaggcatacgctaggctcgctggtacggcgcagagccatacgagcagcgttgacggcttgtaccgctgaaatagcgttacgttcgatacaaggcacctgaacctgcccggcaaccggatcgcaggtcagcccaaggttatgctccatcgcaatttctgcggcgatacacacctgcgccgggctaccgcccatcagttcagccaaacccgctgctgccatcgaacaggctacgcccacctcgccctgacagcccacttctgcgccagaaatagaggcgttcattttatatagcgcaccaataacgccggaaaccaagaagaaacggctatatgagttttcgttaaccggacgaataaacttatcgtaatacgccaataccgccggaatgataccgcaggcaccgttagttggtgcggtaacgacacgcccaccggccgcattttcttcgttcaccgccagcgcatacatgttaatccagtccactaccatcatcggatcggtgttatttttgtcgttggtcaccagcatacggcgcagggctgcggcgcggcgtggaattcgcattggcccaggtaacaaaccttcggtattgataccacgctcgataccgcttttcatcacttcccaaatggcggaaaagtgcgcgtttagctcttctttggtatgcaatgccagttcattttgcagcactaatccagacagagacagaccggtttctttacagtgtttctgtaaatcacgggctgaattgaatggataaggtacagaaacttgattgctggctgctttgccaaaattctcttcgtcaacgataaagccgccgccgatggagtaataggttttgctgtacagcagtttgtcaccggcaaaggcactgatggacataccattttcgtgcagtggcaagttggtttcgtggaaattcattcccccatgtagcgggaaatccacctcatgagcgccctgagccagtagcagacgctcacggtgttcaacatcacggataaactccggaatgctatcgatatcaacggtatccggcagattccctgccaggcccataataatagcaatatcggtatggtgacctttaccggtcagggataatgaaccgtaaacgtctacggaaattcgggtaacggcagaaagatgccctagtgcgatcaagtcatcggtaaacagcttaccagccttcatcgggccgactgtgtgtgagctggaaggaccaataccaatcttaaaaatgtcaaaaacgctgaccatatactcgcctccttcgtgttaaaggcgttaattatgaaattgcttacattaccgtggagtggggagccggtacgatcgcaccggcttttgaaactttaagtctactgctaactgttttaccgtcctaaagatgaacggtagcgaaaagtggccagcgcagcgcaccggccgaacagtcttatttgaacaggctgaacagaattgctgagatggcaatcagacccataatcacaacgaatacgttgctgatatggccactgtatttgcgcatcgctggaactttgtgaatcgcatacattggcatcaggaacagaatcatcgcgataaccgggccacccagagtttcgatcatgcccagaatgcttgggttcagggttgcaacgatccaggttgtgaccagcatgaacagcgcagtgatgcggttcagtttgtcgccgttaatggttttaccgcggctacgcagagatttaaccaccatgccgttgaaaccttcacgagcacccagatagtggcccaggaaagatttggtaatagcaataaaggcaataaccggtgccatgtaggcaatcatcggggtattaaagtggttagccaggtaagacagaatagaaatgttctgtgctttggcttccatcaaatctgctggagacaggctcagaacgcagctgaatacgaagaacatcacggtcaaaaccatcatgatgtggctgtatgccagaatgcgagaacatttcttctcagcgtcctgaccgtattcttcacgttttgctaccgcaaatgcagagatgataggggaatggttaaaggagaacaccatgaccggaataaccagccacagggtcatcagcataccgttgcccacaccgttaccgtcgatagacaggttttggaagatagcgctgctccagtttggaatcaggtacagagccaacagcatcagtaccgcaacaaacgggaataccagaatactcatcgcttttacgatgaagttttcaccaaaacgaacgatggtcatcagaccaacgatcaaaatcagggacaaaatagcccgtggtggtgaaggcaggtgcatctggtgagtaataaagctatcaacagtgttggtaatcgcaacgctataaaccaacaaaattgggtagatagcgaagaagtacagcagagtaatcagtttacctgcgccaacgccgaagtgttcttcaacaacttcagtgatgtcttcgcccgggtttttgccggaaagaacgaagcggcaaagaccgcggtgcgcgaaaaatgtcatcgggaaggcgatgatagccatcacgattaacggcagtaaaccaccgataccggcgttgataggcaggaaaagcacgcccgcgccaattgccgtaccgtacagacccagcatccacatggtgtcgcttttacgccaggtgctggttttggtgtttcccgtggatgaaatggtgccagtttgagtagtgtccataaagatctccgatttgaacacgaaattgaaattaagatccgaaagttaaatacctgttagtgcgttataagtcgcataatcagatgaaaaattcagtcacagtaatgcgttttaaatcttatcaggtcgatttggttctctttaagtagtgcaaataacctgaagtcgtaaaaataaaatttaatccgcggcgagcagtgatgtctctctatgctgatatttttatggttctaattcgtaccctggtttttgctggcggcaagataacgattcatagtgaaaagtaccgtgatcatgctctcaaatgctgaataaacgcctttaaacccagttgttatgaatttccatctaattgttacaattatgttcagtgttttgtactgcacctgcttgataaatgataaatgataaaaagcaaaactgtatttcaatttagattgagtcagcgacttaacctttgctctttatatcttgaggcgcaatatattttaaccagcgcgtcgaatctagcggaaatcgaaattttcagtattttattgacgaaagtcataatgtcaaaacaacagaaattacataacttattgattttaaatttaaattagtgtttatttccgttgggggataatgtgttgatattaatcagtatcacgcagcgctgtttgttatataaacagttaaatatctgagtaaaaggaaagagttaaattctatttgtttgacaagtttgctttaaatactgacttaaggtttatttgtcatatgaaagtgaggcaagttacttttgtctgacaatataaaaggcgagttttagtgcttaaaggtgtctggcagtaataaatgttaaaataatttacttttcaaaccgactgttcgaacatttaataaacaaccattaaaagtgaagtgcgttttttataggcaggaagtcattaaccataatataaaaaaggttatttaattatgccgtcaatcgggtgaaaatttaatccctaactgaaaagtaaagtacgtgatgatatttataatttgctattttggcagaatgaggaacggataaagtcagttaatcaaactcagttctaccgtcggatagaaaagggggaattcattcgctaaacggtactttcggctcaaagatcgccaaacatcgaacatgagagccgcgtttgctaactattgtcgtttaactgtggatttctatgctggtttcgttaaagaacgaacggaaggagccatcaggctggcggtcggtgaccagagtatcaaatagcgtcagtggcccaatactggcaggtttgatttggccgaatttactgtgatcggctaccagaatcttgcgctgagatttgttcagtgcgcgctgtttccacggaatttcgtcgaagttaaaacaggttgcgccgaattcaatgctcactccggcggcagagataaaggctttgttcgggcaaacgttatccagctcgttatgctggccgatgggtgagaaaatatagttgtttggcttgaattcgccgccgcacaagatcactttgcagttcggtttatcttgaagcgaaagaaaggtattcagcgaataacagagggcagtgaaggtcaactcttcgggaatttcgtcgataattagtgggatagtggtgccgcaatcaaagaaaattgtgtcgttttcttcaatgagctgcgcggccagttgcccaattttgcgcttttcctctacctgttttgcctgctgatcggaaacaaaatagttgttagcgctgttcgacttgggatccatcaccacataaccgcccagtagaatcacggcagaaggttccgcactaagatcccgacggattgtcatttctgaaactcggagcaaactggccgcgtctttcaaatgaattttgtcggaacgttttaaagcgtgagtcagtttattaatacgttcggcacggcgagtttccattaacgcttcccaacaaagtaaacccggcctaagccgggttaaagataattagtagctggacgcagccgcttgctggccagatacgatggctacacctgaacttgtaccaattcgcgttgcgccggccagaatcattttctcggcagttgcgcggtcacgcacggcacctgaagctttaacacccatatccgagcctaccgcagcacgcatcaatttcacatgttcttcacgggcgccgccggtgctgaaacctgtagatgttttcacaaaagcaacgtcaagttcacggcacatttcgcaaacttcaacgatttgctcattgctgagcaggcaggtttccaatattaccttcaacggaatagcggcgcaaatatcgcgtacggctttaatatctgctttaacttcagcgactttaccgctttttaaccaacctacattaatcaccatatcaatttcttgtgcgcctgcttcgatagccgccttggcttcaaatactttgctggaagtcagacctgcgcccagagggaagccaatcaccgagcaaactttcacatcgctgcccgcaagctggctggctgccacaggaacatagccggagtttacgcaaacggcgtagaaatggtgttgtttggcttcttcacacagtttgacgatctgcgcttcggtggcgtccatggctaatagggtgtgatcgatataattagcatagttgatagtcataaaaaatgtccttggtttgtgtaggtaatatcatttgttgtgataatagtaacatttaacgcaaatgacaacctttatgttgttaatatcacatgtaaaagccatattttgttatttaaataacatttagtgatggtgttagttcttgctatgaaagagataggagatataaccggctgatttatgatgagttatcttgagagacagagattcttgcgagcaaaccggcagaggttctgccggtaaaatgcgaacagttggcagaaattaatcttttacccaacctttactgataggaaaagagaagcagcgttgataaagattcgccaatcctttcgcgatgttatcgccaaacagattccacagtaactgtgaaaataagcagccgacgattgccaccaagaagccaccgaccatatctaacggccagtgtacaccaaggtagatccgcgaccaggctatggccaacccgacgatcagcaaggcaatgccggaccaaatccgatgccagcataaaaaggccagcgcaaaggtaaagatggcggtgccatggtcgctggggaaggagctgtccggtgcgtggggtaaaaagttatagccgaaaccatcgacaaaggggcgattatgcgggaataacataccgatacagaccgatgaaagcattgcaaaaatcagcgcaatggcggttttactgatggtctgacgctgtagcgacatttgttctcgcgggccccacagccataggccgatcatcagtaatggaatgatgctgatcagatctctggcaataaaaatggcgaacttcaccaaccactcgggtgaattgggcgtggcgttaatcagagaaaacaaaaaatgatttaattgttccattactcagtaccttaatgacggtggtcataaccactaatcaaccaaaaaagagccaattggctaagccagacccaccacccagcccacaggttatgagtcagaaaatgtgccccgcgcatgacctgaccgaatcccattatcattcccaaacatacgccgactatccagcaaagcgtagcaaggcgagggcgttcaggataaaacaggaagaatacggccatcagcgcaaaaccgctggaggcatgtcctccggggaaacagtgaccggggcctgcgccagccggagctgtatccattaatatgtagctggcggcttttccaccgtattccaccagatcccaaggacaggaatgagcgctggtagatttcaatatcccaataaccaaagggccaacgccgatcagcatcgtggtcaccaccagtcgaaaatttcggcgatagactccccaaaatagcgagcagacggccgcgctgataatcgtgatttttaacagccggtgattgaacaaatctaaccagtagttatgttcccaagggaaactctgggtttttggatcaaaccaatagccacttatcagcaagtcgagttgttcattacgagataaccacagaaacaccaatccgctgattgttaacccaaaaacctgccaaaggtaaaaggataacggcaatgagtaaagggggtttgtcctaattatcactcccgttgagccttgatttaatgatgatggagtgttttcactgttcttcacggttaatccagcaggatattcataatagtcccactgtaataattctatattaagaaagccttagggcgcttctgacgcagataggagccgttttagaaaagggaatcagcgtgttagtaacgctaaggattagggcgagagaaatgagcgtgcagccaagggaaaagggctgattactttgaaaaccgggcaaattaacaggataataaacgctgaaaaacgactaagaagaagatgtgatgagtcgattaaacaaaactttcgttcctttgtacgctatcggtattgccttattgagcgccagtgctgctgcggagcgagttagcataacgaaacctttcgtgtgccctgatatttcacccttgccacagcatgtaacaagtgaaggtaatctggtgatcgatgggcaaacctattatctttggaatcctaacgcagctgcggcttcagcgcctttgaccaataccatctggtcatctgctgacggcaagaccgaagttgatattatgcagtatcgagacggacgttttcagcaggcatttatttcgttctctaccaacattcggaaactgccgtttggtgaagatccagagagatatatcaacggagagagagattcctacatggacggtggacagggttgccataactgatcgtcagtcattcagccgaatcgcagccgccgcacggcggtttttttgtgcctgagcagaggtgtttagctacgctgccgccaatttgccgccattaagctgaatcagtatttaatcttgttgtttatagggttactttatttcaggcaagaaaaaacccgattagtcttgaacctaagaaggcgggactatcgggctcctcaatatggggacatcaaagaaaagcagtggcactaattcagactacggctaaaccattaagttcttgccgaatgcgaaaaatataaaatttattgtaccttcaccgaaaatagatcggcgctatccccaaattcccggccagataatcacaatcagcgaaccggccagggtcagtaatacgttagcaatggcgtaagtgcccgcgtaacccaacgctggaatgttactgcgggccgtgtcgctgataatgtccatcgcaggggcgcaggttctggcacccataattgctccgaataatagtgcgcggttcattcgtaaaatataggcaccgaacaggaagcagataatgactggcaccagactgactatcaggccggatatcagcatttgcccacccacggcacccagactgctattaataccgccaccggcgctcagaccaacgccagccataaacaccatcagcccaaactctttcaccatattgagcgcaccctgcgggatatagccgaaagtcgggtggttggctcgcaggaagcccagcatgatgccggccatcagcaagcctgctgcgttaccgataccgaaactgaaattactgaattggaaggtaatcagaccaatcatcaggccaataataaagaaggcacagaaagccagcagatcggtgacctgactatgaatggaaataaaaccgattttttccgcaacgcttttgacccgacgggcatcgccgctgacctgcaagacatcgcctttattcaatacgatgctgtcatctataggcatttcaatctggctgcgaataacacggttaaggaaacagccgtgatcggtcagtttcaaatgactcaggcgtttacctaccgcattactgtttttgaccacgatttcttcggtaacaatacgcatatccagaaggtcgcggtcgaaaacttctttaccgttacggaaactgggatcgaggcgcgaatgagcatccgggtagccaactagcgatatttcatcgccaacctgtaacaccgcatcgccgtccggattagccagaatgccgttgcggcgaatacgttcgatgtaacagccggtctgacgatagattcccagctcgcgtaaatttttgccgtcggcccaggctaccagttccgggccgacgcggtaagcgcggatcacgggcaaatacactttacgctggctatcggtatccagaccgcgctcacgggcaatttgctgggcgctggtcggcaaatcctggtgttgcagttttggcagataacgcgcgccaaaaatcaggctaaccaaaccgatcaggtaagttagggcatagccgaggctcaggttatcctgtgcgtgttgcaacgtcgggttattggcaatggtatggcgtagggtgtctccggcaccgaccagcactggcgtcgaggtcatagatccggcgagcataccggcggtgaggccaatgtcccaaccgaacagtttacccaacccaagcgccagaaccatggcgcttccgaccattaccagcgccagcatcaggtagtttttgccatcacggaagaatatagagaagaaatttgggcccgcttcgacgccgacacaaaaaataaatagcataaacccgaggttcagggcttcggtattgatagcgaaatgctgttgtcccaatagtagagaaacaaccaatacgccgatagagttacctaactggaccgagcccagccgtaatttaccgaggcacaaccccagcgcgagaactacgaataacagcagaatgtagttgccgtttaacagatttgcgacgtttatattcacggaggataacttattgtttaacctgaagtagataacgctaaaaagggttatgtgacccggtaatatctgcattcgttgccagataaatgccttcagcaaaatctgatgcatgtaacggcaatggcggtggttattctagtctgtccgagggattacagccagtagtaagcggggaaatcggtgttagcggataaatatgcttttaacggggaaattaatagcgggatcggccaaaaaatcaggccttatctgtgggattttcgtgattttattttgaagtttcatgagagcgttcaagccaaaatacagagagggtgccgaagctccctctctttatcgcacctaagccatcaattaatggcttaggtatcgctattatttgaacagattcagatgttctttagcgtaagcttcaaaatcagtgaaaccaccgatgtgtttttcatcgataaagatttgcggtacggtttcaaccggcttaccgacagttttttctaaatcggctttggtgatattttccgcatgaatgtcgatatagttgaaatcaaaatcgtcacgctcagctttcagtttttcggccagctctttggcacggacgcagtaagggcaaccaggacgtccgaaaattacagtaaacatgcaaaactccttgattatattgagttaatcacttcgtctgccaatcagtgtatcttcgattgctgaatgacttgtcgcgtattactcactttcattgggtgttactatgcccgttgatgagacgaaaacaaagtaggaattgcctgttaatccgattatccgaacctatttatatccgtcgattctttggcttaaccgattatttacattcattgagtgttgtagcattggcggattcaacacctttggctaaatcttataagtagttgtacaggaggaaaagatgcgtgctttaggcgatatgcccaaaatggtgattattttggaagccttgggaatgttattactggtgctggcctatttaagtatcaatcattatgtcacgctgcccgctggattaagcgagcctatcgtcgcgattatgatgatatttattggtattgggctaatggttccagccgcagcctgcatagtctggcgtgtggcgcagggttttggcccgctattgggaatgaatgggatcgataaaaaagacaccgccaaaacggcagataaagaggagaaaaagccttaatccctgataacgataatgacaaagacttctttttcctgttgtttgcgtatctcttcgcatatttcgcagatagtcacggcttttgctgtcaattagtctggattggtcatggcgctaacggcgaatattccgtaagctatgccacttttcttgttgcaagaatcgtgaggtaggttgctatggattcactcatcgtcccggatttagccttattacggcgttggctggatcagttagggatctcgttctttgaatgcgactcatgccaggcactgcatttgccccacatgcaaaattttgaaggcatatttgatgccaaagtggacctggtagataacgttattctcttctctgcgttagctgaaatccggcctacggcgctgattccgcttgttgcggatttaagccaaatcaatgccagctcgttaacggccaaggcctttattgatattcaggatgataatctgccgaagttgattgtttgccagtcggtgtacatcacccaaggtattacgctggagcagtttggccactttatgcagcagagcgaagagcaggtttcgatgattattctggaagcccgagcaaacgatctgctgttcatcggtgaaaccgaagaggaagaagggcaggtcgtgccgacctctttcccggttattcactgatttagctggccgccatccccggcggcatgctgtttttcatttttcccgccataagatcctctgctttttaccctagtttgccagatatttagcgccgtttatgccacaagtggcgaattacatagattaactatgcataaaaagtcgataaaaggcgttttttacgctggatactggctcgtataactatcaggggttatgctttatgctctgcaaagggcatatgattacccccgcaaattcgtggttattgacgcttaatcaataactcactccagtgcatagccatgcataacgagtttgtggcaatagcgctcgatcaggaaaggtgttgtacccgtcgggtacaaattcaattctatgatttaccctgttctggaggagttcacggatgttcacccaacgtaaaaaatggttatcgggtgttactgcaggcctgcttatggccgcgtccgtctcagtttctgctgaggaaaaaatactgcacgtttataactggtctgattatattgccccagacacgctggtaaatttccaaaaggaaaccggcattaaagtggtttatgacgtgtttgactccaacgaggtgttggaagggaagttgatggcggggagtaccggattcgatctggtggtgccttcggccagtttccttgagcgccaattatccgccggcgtatttaagccgctggataagaacaaactgcctaattataaaaatatggacccggaattactcaaactggtgagtcagcacgatccggaaaataaatacgcgatcccttatctgtgggcgactactggcattggttacaacgttgataaagtgaaagcggcgctgggaaccgatgcgccaatcaacagttgggatttggtgctgaaaccggaaaatctggagaaattgaaaagctgcggagtgtccttcctcgatgctccaagtgagatttttgccactgtgctcaattatttgggcaaggaccctaacagcagcgatgccgctgattacaccggcccggcaacagatttgctgttaaaactgcggccaaatattcgttatttccattcttcccaatacattaacgatctggctaatggtgatatttgcgtagccgttggttgggctggtgatgttatgcaggcctcaaaccgagcaaaagaggcgaaaaatggcgtcaatgtggcttacagcattccgaaagaaggggctttggcattcttcgatgtttttgccatgcctgcggacgctaaaaatcaggatgaggcttacctcttcctcaactacctgatgcgcccggaagtgatcgccaatatcagcaaccatgtgttttacgccaatgccaataaagccgcgacgcctttggtgaatccggacgttcgggataatccggggatttacccgccggcggacgttcgcgccaaaatgttcaccctgaaagttcagtcgccaaaaattgatcgggtgatgactcgcgcctggactaaattcaaaacaggtaagtaataccgttgattgagccgttggctgttttcagcggccaatctggtatcacctaaaatgatgaggggagaaacagtagggaaaccggctgtttctgttgctattttgtgccgcattatgatgtggcctcttctgcttctacggagagcacgcagagtgaatgatgtaatttcccgtccgccgttgaaatccctgaaggcgtttacccctttattggaaattcgcaatttaaccaaaatcttcgacggtcaggcggccgtggatgatgtcaatctaaccatttataaaggcgagatttttgctttgctcggcgcgtccggctgcggaaaatcgacgctattgcggatgttggcgggttttgagttgccgactcaagggcagattgtattagatgggcaggatttgtcccatgtgccgccttaccaacggccaattaatatgatgtttcagtcttatgcgttatttcctcatatgaccgtcgagcagaatattgcctttggcctaaagcaggacaaattgccgagtggggaaattaaaagtcgggtagaggaaatgctggcgctggtgcatatgcaagagtttgccaaacgtaagccccatcaattatctggcggccagcggcagcgggtggcgttggcgcgtagtctggctaagcgacccaagttactgctgctggatgaaccaatgggcgcgctggataaaaaactgcgcgaccggatgcagttggaagtagtggatattctggaacgggttggcgcgacctgcgtgatggtgactcacgatcaggaagaagccatgaccatggctggacgtatcgcgattatgaatcgcggaaaatttgtgcaaatcggtgagccggaagaaatttatgaacacccgaacagtagatttagcgccgaatttataggttcagtgaatgtctttgagggcgtgcttacggaacgccaggaagatgcgctggttattcgcagccctggcctgcgtcatccgttgaaagtggattcagacgcttctgtagtcgacggggtgccggtgttggttgccctgcggccagaaaaaatcatgctgtgcgaaagcgtgccggaagctggttttaactttgcggtaggtgaagtggtacacattgcctatttaggggatttgtcgatttaccatgtcaaactccatagtgggcaaactattagcgcccagctgcaaaacggccatcgttatcgtaaaggtatgccaacctggggcgatgaagtgcgtctgtgctgggaaacggatagctgtgtggtgctggggagctagaagatgatacctaattcggttcaagcaacgccggagccaccaacccgccaatccggtgtgttaatcgctcgcctacagcgttggcaaatggctcatggccgcaaactggtgataggtttgccctacctgtggctgtttttgctgtttatgctgcctttcctgattgtatttaaaatcagtctggctgaaatggcccgtgcggttcctccttacaccgatctcatgacatggatggatggcaagctggatatttctctgaatctgggaaattacctgcaattgctcgacgatcctctgtatatcgacgcctatttacaatctttgcaggtggccggtatttccaccttgtgttgcctgatcattggttatccgttggcctgggcgattgctcacagcagtcattcgacgcgtaatattctgttgttattggtgattttaccttcgtggacgtcatttttgattcgggtttacgcctggatggggattctgaaaaacaacggtattttgaataacgtgctgatctggctcggcgttatcgatcagcctttggtcattttacataccaatctggcggtatatatcggcgtggtttatgcctacctgccatttatggtgttgccgatttataccgcgctaacccgtttagattattcgctggtggaagcggcctccgatcttggagccaaaccctttaaaacgttcttcagcattattgtacctttgaccaaaggcggcataatcgccggatcgatgctggtgtttattccggcggtaggggaattcgttattcccgaactgttagggggcccagacaccatcatgattgggcgcattttgtggaccgaattctttagcaatcgtgactggccggtcgcttccgccgtagcaaccgtcatgctgttactgttgatcgcaccgatcctttggttccataaacatcagaataaagaaatgggaggtcaaggatgaataacctacctgaggttcgttctgtctggcgacgggtgattctggtggtgggattcacctttttgtacgcgcctatgctgatgctggtgatctattcatttaacagcaataagttggtgacggtgtggggcggttggtcaacccgttggtataccgaattattccatgattctactatgttatcggcagtcgggctgagtctgaccattgcggcggcttcggcgacgatggcggtgatactcggcactatcgctgctttggtaatggtgcgttttggtcgttttcgcggctctaccggttttgcctttatgttgactgcaccgctggtgatgccggacgtgattaccgggctgtctctgctgctcctgtttgttgcgatggggcacgctatcggctggccggcggagcgcggcatgttcaccatttggctggcccacgtcaccttctgcactgcttatgtcactgtggtcatcagttcgcgactgcgggagctggatcgttccattgaagaggccgcgatggatctgggtgccacgccgctaaaagtgttttttgttattaccgctccgatgatcgctccggcgttgatctcaggctggctattggcttttacgctgtcgctggacgatctggttattgccagttttgttgccgggccgggggcttcgacgctgccgatgttggtattctccagcgtgcgtatgggggtgaatccggaaatcaacgcattggcaacgctgatcctgctggtggtcgggattatcgggctgatcgcctggcgaatgatggcgcgctcggaaaagcagcgatcgcgtgaattacgcaaagccgcccatggctgaaatttcccaaagctgctaggctttctctcgatcgcatgccgtctgcgggcggcgttaatgtgaaagataacatcaggttgcgggagagggtggatgagtgtcagtctgggagaagggcaagccaatatgaaagtttccgcagccacgccagtcgccgtattagtcggcggcaccgccattatcgcgactcgggttttaggcctgttgctgctggtagccgaactgggcatgggcggaatgcagctttttatcgcggaaaatctgcaaagttgggattctggcctgatcttgctggctagtctggggctggttttcctcgaaattgcctgcggacgagctgtcatccgtcgtaagaactggggtcgttggtgctatctgctgtgccagattgtggtggtagtttatatgctgctggcttcactggactggttgtatgttgatgtattccgcattgagggcgaaaacgaagccgaggtgttccacagtctgttaatacaaaaaatccccgacgtggtgattatgggtctgttgtttattcctttccattcgaagcgttttttccgccagtcaaaatgagtgtttcccgacgcggggtggtacaatccgcccccattggcggccgagagcgctgcaaatctcaacgtaataaatcataacggtcaatattcatgcattgcgcacagtatacggcgggcagctgccgttcctgtcagtggttggagaaagattactcccaacaactggcggataaacaacatcatttagaaaatctgctggccgggcaaccggtagctcaatggctaacgccggttttcgggcgtgaaagcgcttttcgtaataaagcgaaaatggtggttagcggcagcgtagagcgtccgttattcggtatgttgcatcgggacggaacggcggtggatctgagcgattgtccgttgtatcccgccagttttgctgcggtatttgccgttttgaaggtttttatcgctcgtgccggtttaacgccctataacgtggcgcgcaagcgcggcgagttaaaatttctgctgttaaccgaaagcaccgtcagcggcgagttgatgctgcgctttgtgctgcgttcggaaactaaggtagagcagttgcggaaaaccctgccgtggctacagcaacaattacctctgctacgggttatttccgtcaatattcagccggtgcatatggcaatactggaaggggagcaggaaattccgctgacggagcaacaggcgctggaagaacgctttaatcaggtgccgctgtatattcggccgcagagtttcttccagaccaatcctgatgtggccgccgcactgtacgccacggcccgcgattgggtacgtgagctgaatattggtagcatgtgggatttattctgcggcgtcggcggttttggtttgcactgcgctacggcggaaactcgtctgaccggcattgaaatcagcgctgaagctattgcctgtgcgcgacaatcagcggaaaaactggggctgaaacaggtcagttttgccgcattggattccacacgttttgccaccggcgagacggaagtgccggaattggtactggtcaatccgccacgccggggcatcggcgccgcgctttgtggttatcttagccaaatggcgccgccgtttattctctactccagttgtaatgcggaaaccatggccaaagatatcgctgcgctagcggattaccgcattgagcgagtgcagttgttcgatatgtttcctcataccagccattatgaagtgattacgctgctggtgcggcgcgagccaacggcttgagtttcgaaaagcttaagtgctgaatcatagaaaaagccgaaaatcattgttgaaatccggctttttatctctgtaatttctctggaatatcaggcaattctattgattgcaggaattattgcgggaaccatttgtcattaatggttttataagtgccgtccgccttcactgcatcaatcgctttattcagtttgcccaacagctcggtattctcagggcgcactgcaatgcctaaacctgtgccgaagtattgtgcatcggtaacgtgctctcctacggaagccaattcagggttactcttcagccattcgttgaccacggcggtgtcaccgaatacgccgtcgatacggccatttttcagatctaaaatggcattctgatagctgtcgtaagacacggtctgaatttcaggatgcttttcctgcatgtatttctggtgtgtagtaccgttttccattccgagacgcttgcctttcaaatcggccagagaggtgaacttgcctttatgggcaatcacaatcgcggagttggcgtagtaaggctgagtaaacgcgacctgtttgctccgctcaggcgtgatatccattccagaaatgacagcgtcatagcgacgaaattttagcgcaggaatcaggctgtcaaaggcctgattggtaaaggtacagttggcttccatttgtttacacaatgcttttgccaaatccatatcgaaacctacaatctcattattggcccccatagattcaaacggtggataggttgccgaggcggcaaaacgaatggtttccgcagcgctagcgctaaaggccaccccggtcagaattgtcgccagtaatatctttttcatgcctaaactcctgtctgaaagtctttaatagggtgcaacattacttattgattttattaccgctaaggaacttttagcggtgtgaaataccataatcaattggaattacattgccaccttgtgaattaatatgcaagaaaagtgattaaaaatataataaaaaaatcaacataatcctcttcgccaaaagcgtgttaaaaatgccgcagtgggaaaaatgagcttggcaataatcaggggggaaattgcgtttttgacgtgggatttattcttgacatgaataaaaaaccccggcagataccggggtttcaaagtgcagtgatttaaggcttaattacgacgttcgaaggccagcgcccgacgttcaaccagacgcatcagtagagtcagcaagccgttaacacacaggtaaacaatacctgccgcgccaaataccatcacgtcgtaggtgcggccatacatcaactggctgtaacccatcacttccatcaatgtaatggtgtatgccagtgaggtacttttaaacaccaacactacttcgttggaataagacgacagagcgcgtttaaaggcgaacggcagtaaaatccgcagcgactggcgtttggacattcccaacgcttcgcaagactgccactgaccggcaggaattgcccgaaccgctccatggaacagcagtgtggtataggccgcgctgttcagcgccagtgcgatcatggcacacagccagggttgcgaaagtacatgccacagccacggatattcgcggatcgccgggaattggccggggccgtagtaaatcagaaagatttgtaccagtaacggcgtgccggtgaacaacgtgatgtaaatcttcaccaactgcgtggctatcggggttttcagcgtcagaatgatggtgaaaatcaacgacagtaccaacgccaccagcagcgaaacaaaggtcagcgtcaggctggtatgcagcccttttaggatctcaggtaaataatcaaacatcaggatgggctccgttcaaaacgcgtggtacggagttcaatcagcttgattacatactgacttagcagagtcaccaccagataaattgcagcggcgatcatataccaggtaaaaggttcctgtgtgcgcgtcgcgatgcttttggtctgcaacatcaggtcatttacgctaatcaacgacactaacgcggtgtctttcagtaaaaccaaccactgattacccagccccggtagggcgtggcgccacatttgcggcataatcaggcggaagaagatcgtcgcctgactcattcccagagcctgcccggattcccattgaccggcaggaatcgctttgagcgcgccgcgcagcgtttgcgaagcataggcagaatacagcaacgccagcgcaatcacgccgcacaggaaagggctgacctcaaatgtgtcgatattcagcttcaccggcagttcgaacagatagaaattcagagtgaagccgtctgacagcatcatcagtaattgtgatgaaccgaaatagataaatagcacgaccagaatctctggcaggccgcgtagcagcgtaacccaggcggtgcccagatagctgatgaccttccagcgggaggattcccaaacggcgaacaacattgccagaatgaggccgagaaccagtgcgcaaacggcaaggccgacggtcatgccggcggcgcttgctaaaggttgaaattcattcatgggtgcttaagttactgttggaaccattttttgtaaattgtctgataggtgccatcggctttcactttcgccagtgccgcatctaacttacccagtaattcggtattgttctgacgtaccgcgatgcccagaccggtaccgaaataatccgcatcggaaattttgtccccgaccggcatcagttcatgactctgcttcagccactcgttgaccactgcggtatcaccgaatactgcgtccagacggccattttttagatccagaattgcattctggtagctgtcgtaaggcactgcggtgatttcagggtgcttttccaacaagaatttctgatgcgttgagccgttttgcatgccgacgcgtttaccttttagcgcggccagatcggcgattttgcctttctgagcgataaacagcgctgagttatcgtaataaggtttggtgaacgcaacctgttttagacgctcaggcgtaatatctacgccggaaatcactgcgtcgaaacgtttgaatttcaggctcggaatcagactgtcaaaggcctgattggtgaaagtgcagttagcctgcatctctttgcacaacgcattggccagatcgatatcaaaaccctgcattttattattagcatcaataaactcgaacggcgggtaagacgcttccgccgcaaaacgaatggtttcagccgcagaagcagacagactgatactggcaaggaccgctgcaattaataattttttcatcgaaaattcccaattagatatcaatgtgacagatagctggcaaaagcttcggtgtgaggctgggcgaaatgactggcatcgccttgttccactacgtgaccgttttccatataaaccacccgactggcagttttacgggcaacttcaacttcatgtgtgacgataacctgagtgataccggtctcggacagctcgcgaattatgctaacaatttgcgcggtaatttccggatcaagcgccgccgttggctcatcaaacaacagaacctgtggctccatcattaatgctcgcgcaatggccactcgctgctgttgccccccggaaagatgcagtgggaaacggtcggcaaagtcggtcagccgtaaacgggacagcaattttttcgcgcgcgccatcgcctgatctttagatagaccaagcacccgacaaggcgcttcaatcaggttttgcaccacggtcagatgcggccagagattatattgctggaataccatgcctacattctgacgcagttcgcggatcgctttcgcgtcaggagcttgggtaaagttaaaatggttacccgcgatctgtaatgtcccagagcgtggcatttccaaaaggttgagcacgcgcagtaaagaacttttacccgcgccgctagggcccagcaaaaccagggtttcccccgctggacagttcaatgtgatgtcgaacagcgcctgatgtgcgccgtagtaacagttaattccgttaagttgaatactcatgcgccaaatctgaatagccaatgatgcggggaatgttaacttccgcggcatacttatgcaatctttgtgcgttaaaatttattaataaccggttggaacccgcaaagctagcataacctctgggtttatttcccgtggagaggaatttgtcgtgtggtgaataaaactggcagagaattcactgaggcgcataaatggctgccaccagtggtgcgattctccggccagtttattgtctgagctagcgctgacccaacagctggcgcagagagctggctggagcattggcccccataaagcgaatatcgtctactacccagcaactgccttctcgtaccatcaaaacttcatcctgccagcgagattccttaccgtccggcgcgcggtgtaccagagtcactcgtagcggtatatttttggcatcggtgttgggaatggtggaggcgctggccacatctgcgtcactgacgccggcgtaaacgctggcgatggcctgatcggcatgggtggtcgaacggttagcgctctgcgtctggcgcgccttttgaatatcctgatacagagcctgactcaggaaaggacgcagttgttctgcggaataattagcagacgcagtgcccgcagcgcccatttgctgtacgcgtaagttatagaactgttcagcgacttgatccgggccgccttccacgcaagggccgttgcgactgccgatatccttaaacgcaggtgtaacgggagtggtacaggcactcagcagtaacgccaagggtaataccagtgcaatattttttttgttcattttattacctatgtgaaatgccagacatgcaactcaatcatgcagttaatatagtataaatttatttttacggatgaacttagggtgcgtcttatttacttggagttcatgttcatgttgttataaatatctatctgaaaatgatatgtaccgcctattatttgggcgatttagggtttttatctttggtttaaggaatatgccatgcagttatctaccactccgacgttagaaggttttaccatcactgagtattgcggtgtggtcaccggtgaagccattctgggcgcgaatatttttaaagatttcttcgccggcgtgcgggatatcgtgggaggccgctccggtgcctatgagaaagaattgcggaaagcgcgacaaattgcctttaaagaactgcaggaagaggccgtgcagctcggagccaatgccattgtaggcattgatattgattatgaaaccgtaggaaaagatagcagcatgttaatggttagcgtcagcggcacagcggttaaagtatcccgttagtggttaaattggcttggtaatccgaattgtttgctgatcgtgtcggtatagaataaaaaggtaacgaatattttacctttttattcaacttattaggttaattcatttaacgcattcctcttactcatacctattaacgcgaaacgcgaaattagtttttattaggtaaaatccggaggaaaccgataaggatatcgagatgaaacaatgcttctggatgctgtttattatgctgttggtaccgtttcatgcgctgggggctgtacaggaagacaaggctttggttgaccaagggagttttatgttgaatgactctcgtcaggcaatgggcgtcgatcggcggattcgctttttggttttacattatacggcactgaattttcctgaatcccttaacgtgctgacaaccgaacaggtcagcgcgcactatttggttccagcttatcctccccgagatcaccatagtggtaaacccgtcgcctggcagctggttcccgagcacctcagagcctggcatgccggagtgagcagttggcgtgggcgaactaatctcaatgacacctctataggcattgaacaggaaaacccgggattcaccagtaccctgttggggaagatacattggtacccttacacacctcaacaaattgaactggtcactgctttggcacataaaattatcgaacgttatgaaatagagccacgtaatgttgttgctcacagtgatattgcgccacagcgtaaagaagatccggggcctttgttcccttgggagcatttggcgaagcaagggattggggcgtggccggacgtcgcggatgttcaatattatctggggaagaggcgtgcagatcgggccgtgccagtaatgccgctgttagctaaactcagctgttatggttatgaaatcacgcctgatatgacgccggaacagcagagaagagtgattagcgctttccagatgcattttcggccctcggatatacgcggtttgcctgatgcggaaaccgaggcgatagccgatgcattattggttaaatatcataagcctgaggaaaataaggatgtcgagcttcggatgagtgagtctgcgctcaatagcgtgagtgccgagtgcgataaactctaaaagtgtcgcgaaaaagcagcgtagcccgttggtttcgctgcttttcagtattaccctcgtagctttccgtgttctttcagccagcgagcagtgcggttaatgctttcatccaaagaaaccagcgagcgatagcccaattctttttctgcccggcgggtatccaaagtcagatcgaagttgagcttggcgacgccgtagtgggtcagaaccggctctttttcgcttttattccccattctttccatggtacgcgccatcacgtccagcattggatagggaatcgaacgaatgcggcacggcatatccagcgcgtccaacagctgctgaacgatggtgcgcagcgggcgcggctgctgattggtgatattgtaagcgcggccagattcggtggtggtggattgcgtcgccagccacatggcgtgaacggcgttctccagataggtcatatccaccaacgcttcgcccccgcgtggcaataacaaggtgccgtagtgcttaatcatgtgtaataagcgcggtagcatcactttgtcatgcggaccaaacagcccctgtgggcgcaaaatggtaaagtgggtttgcgggttagacagagccaactgccggatcacttcttcccccgcagctttactgcgggcaaattcgttagcaaaacgcgccggtcggaaatcttcctgaatatttcggtgatggtgataatcgaagtaaatcgctggggaagagatatgaataaaattctctaccccgtaagcggttgcccattcccccaaacggcgagtcgcgcggacgttcgccagttcaaaagcctgctcggtaccccaaggggaagtgaagctggagcaatgccagagcgtatcaacatcggccagcatggctttggcctgcgatgaaaccagattcgttaaatcggcatgaataaattcagcgcccattttttccaataggctacccatggcctgattacgaccggttgctgtcactttgataccttgacggcggagatattcaacggcgtttcggcctaacccactggttgcgccggtgaccaataccttcataacgaattcggttcccaccaaaaatcagagtgctggcggcaatatcatgcgcgcagcaaataaggtgccattctttcgtgaaatgatgcgctatgcaatcagaaagggctgactaagggttgcaaactgtgtggttgatcgacaaatgcgcgctatttgtgcgcttcccgatcgtattgctcggccagttgcgcaattctcttcgccatgccacgaaaaataaacaggtgagcgggcatcataacgaaccaatacagcagtccgctgaagcctgccggatgccaccaggcccgaacatcaaagcggcgtttatcccctaaatctttgatggtaaaggtcagtcgccccaatcctggcgctttcataccaaacatcatggccagttgacgcagtggttttatcgtaatcaccttccagccatcgactaaatcacctaattccagcgttggtcggtctggtcggccgtaaacgacgcctccgcctgccagatcgtccatccaggcgcgggttttccacagcggattaccgtaaaaatagccttccgggccaccgatttgctgcacgacatgccacaaagcttcgctggaagctgtggtatccaattggcaaccggcctgtttgggatagaagccgtaaccgggacgccagcgggcgcgggcttccggatcgtaaccccaatcggcggagtcaacgactttgtcttcctgccgcagggtttcccgcaccgcatcgtcaaagctgattaaattctgcggtattaatgcctgtaacggagcgccgtctgcgggtaagtcatgattcaagccctgaatcaatgcgctggcaatactggtcggcaccgaggtaatcatgctgataaaatagaccgaaataaaacgggtcggcagcggaatcgggatcagccagcgacgtttaccgctaatggcaataaagcgctcaaacagggtctgataactgatgtattccggtccggcgacgtcaaaaatgcggttttcatcagagggataattcagtatttccgttagataaactaataggttatccagcgcgataggggatgacttggagcgaacccagcgcggcggcgtcaaaattggcaggttgtacaccatatcgcgcatcacttcaaaagccgctgaaccggggccgacaataatgctggcacgtaactcagtgacaggtacgccgctttgtcgcagtaaatcgccagtcaattttcgggcgaccaaatgtggggaactgttttcctccggttgcaatgctccgaggaatatcacctgttttaccgaggagtttttcagcgctagctgcaagttactggcggcctgtcgctcctgttctaccaagtcctcgccgtcgcccatggcgtgaaccagatagtagagaacgtcaatatcctgtagtgcgtgacgtagggtctccggctgatacagatcggcaaaacagcagcgaacattcggccactgttgttcttccagccattcaattcgacgtgcagcggcggtaacctgatgcccttgctggcaaaggcgtggaattaaatgctggccgatgtagccactggcacctaacactaagattcgttgtggtgtcatgatagtcactcggtaaggttggcggtaacagaatcgatatcttgggctgtttctgccgaaatagaaatgccctggcgacagaatatcaccaaggcgacgtagacaaaaaatattattaatttcagttatgtaatgtcaaaaactcataccacagtgcaaccactcgttctaaatcacttcggctaacgtccaaatgcgtaatcatgcgggtcactggcccggcgctgattaacacgccgcgctcacgcatccacggccccatttgggccgccagctctgccgactggcgaatgtacaatatattggtttgagcgccgggagcgataatctctacgccgatatcccgcaacttttgctccagccacactgcgttgtcgtgatcctgctgcaagcgctccacgttatgctgcaaggcgtaaagtcctgcagccgccagaataccggcctgacgcataccgccgccggttattttgcgccaacgtatagcgcgcttaacgtattcttcgctgccgcacagtaaggaaccgaccggtgcgcccaatcctttggaaagacagagagtcagggtatcgcaatactgggtgatttcccgtagcggaacctttagcgccactgcggcattcataatgcgcgccccatcaatatgtaaagccagatttttttcgcgggtcaacgcccatgcctgttgcagataactgatgggcagcacgcggccgctgtgcgtattttccagactgagcagacgggtttgagcaaacagaatgtcatcaggtttgatggcggccagtactttatccaacggcaaactgccgtcgtcattggcatccagcggttgcggctgaatactgcctaaaaccgctgcaccgcccgcctcgtacagataattatgggctttttgtcccacaatatactcatcgccacgctggcagtgcgttagtaatgctaccagattggcctgagtcccgctgggtaagaataatgatgccgctttgccggagagccgcgctccctcggcttccaacgccttgactgttgggtcctcgccgtacacatcatcgcccacttcggcattggccattcgctgacgcatggcaggagaagggcgggttactgtgtcactacgcagatcgatatacatatcgtgaaagctcttgataaaggaaagtcgcgagggcaggatgagtaacctcacagggtagccgtcggttattttcccctgaaatcgttagtatctggccggataaaagtttacccgtgccagaccttgatcgctatcatatgtcacaagatatatgtcacaagacaaagtgtggtacggcaatatctgacatgtgaccgactcattgattaacgtagccagttggttttggccagctcaaccacttcatccccgcggccattgataatggcgcgcagcatatacaggctaaagcctttcgcctgctcaaatttgatttgcggtggcatggaaagctcttgcttggcggtaacgacgtccaccaataccgggcctggatgggcgaaagccgtttccagcgcgctgttcagctcggatgctttctctacccgaatgccttttattcctgccgcattggcaatggcggcgaaattaggattgtgcagatccgtgccgtcggtcaggtagccgccagccttcatttccatagcgacaaaacccagcacgctgttattgaacaccacaattttcaccggcagtttaagctgcgccagtgatagaaaatcgcccattaacatagtaaaaccgccgtcgccgcacattgctaccacctgacgttctggtgccgttgcttgcgcccctatcgcctgcggcatggcgttggccatggaaccgtggttaaacgaccccagtagacgacgtttaccgttcatttgcagatagcgggcggcccagaccgttggcgttccgacatcgcaggtgaaaatggcgtcgtcggtcgcataatggctgatttgttgcgccagatactgtggatggatcggctgatcgtcattggctgtcgccagtccatccagatctttacgagtggttcggtagtgttccagcgctttatccagaaaacgccggtcgctttttacctgtagttgaggcaatagagcgcgtagggtcgttttgatatcacccatcagcgccctattcaccgggcagtgagcgccaatgcttccaggattaatatcgatttgaataatgttagcgtgagtaggataaaaggcccgataagggaactgagtgccgagcaaaatcaacgtatcggcattcatcatggcgtgataaccggaggaaaaaccaatcagcccggtcattccgacgctatagggattatcccactcaatatgctctttgccgcgcagcgcgtgtaccaccggtgcttgcagcatttctgccagtttcaccacttcgtcatgggcgtcggcgcagccgctaccgcacatcaacgtaatgtttttagcggaatttaaggtttcagccagcgcttccagttcgctcatcggcggctgaattagcgggtgttttggggtatgccagaccatcggcgcatcttccggcgcggcttgcagtgctacatcgccgggaagcacaatcacagaaacgccgcgattaaggatggctttgcgcatggcgatttccaatacgcgcggtaattgctcaggatttgtgactaattcgcaataatgactgcattcgcggaacagttcctgcggatgcgtttcctgaaaataaccgctgccgatttcactggagggaatatgtgcagcaatggccaaaaccgggacatggttacggtgacaatcaaaaagtccgttgattaaatgcaggtttcctggcccgcaggaaccggcacaaaccgccagttcgccggttaactgcgcttctgctccagcggcaaaggccgcaacttcctcgtgacgagtacctagccattcgatggtgcccatgcgatgcaaactgtcacttaatccgtttaaagagtcgccggtgacgccccaaattcgtttcacgccagcgagttccagcgttttagccaccagtgttgctacggtctgtttcatacttcccccaagatttaatcgcgatgcttttattccaggaggagaaagtatggtctgtttaagagttaatgccctattaaccggggtttatattgtgtaatagggcattttttgttgtcgtcaggccaattgggtatcgccctgcaattgacagctacaggccaacacgtaaccctgagcgatttcttccggcgtcagcgtcatggtgctggtggtcgtgtaattaccggaaatgattcgagttttacaagaaccgcagacgccagcacgacaagccgcggagacaggcaccttattttcttcaagtgcgaacagtaaagacgcgccgaccggaactcgcagttggcgtagcgggcgattaatggttaatgtcagttggttgcctgactgtggtttttcttcttcgatgtggaactgctcttgctggaaacgttctggcggtacctgttgctcacggcaataattttccacccacatcctataaggcgcggggccgcaggtcatcactcggcattgtcgaatatctggcgcgattttctgcatgatttccgcagaaattctgccgctgaaaaaaccttctttagcccccgattctgccatcaaagtaatatgtaaccgcagcgggtgggcttcaatcagcgcctgccattcagcggaaaaaataacgtcatctggggtacgaacgttaaaaatcacccgaatatcggcctgcggtcggtgggctaacagccagcgacacatcgacataattggcgtcacgccgcatcctgcggccagcattaaataacggtcatcctgattatcggcacaggtaaattccccctgagcgtcggatagccacaggtaatttcccggctgtacctcttgagttagccaacgagaacccgtgccgtcgggcaggcaacggatagtcaaacgaataaagcggctcaggcccggagaagaggaaagggtataggcgcgcagggtatcttcactgttgcgaatactcaccaacgcatattggcctggttgatacggataaaaatcgtggttgattaattgcaggctccaaacatctggcgtttcctgcacaatagagtgcacctgcatacgattagggcacattggtgttggcatcgtcatagcaaaccctcgtggttgcgcggtaatagaaacggtcagcgccggaggcgaatagcgctgaccgcaccgtggcttaggccaccagaatttcgttcaaatcttgttcaaccgaggtgatcgggcgcataccgaatttttcattcagaatggccagcagattatcggtcaggaagcccggcgccgttgggccggtatagatatttttgacgccgagagacagcagcgtcagcaaaatgacgatagctttctgttcgaaccacgacagcaccagacttaaaggtaagtcgttgacagtacagcctaattgctcagatagttttaccgctagcatgatcgcggagtaagcatcattacattggcccacatccagcagacgcggtaaaccttccagcgtgccgaagtccagtttgttaaaacgatatttaccacaggccagagtcatgattaggcaatcttgcggaatattgcgggcaaaatcggtaaaatagctgcgttcgtcccggctgccgtcacagccgccgaccagaaagatatggcgcagttttttacgagaaaccagatcgataaccgtatccgccgaatttaatagagtctggcgaccaaaacccacggtgatcatgtgttctagctcgttgtacgggaatccggccatacttttcgcttgcgtaataacatctgagaaatcatcgccttccaaatgattgacgcccggccaaccaacaatgctgcgggtccagatacgatcgccgtaattacccacgttgggatcgataatacagttggaggtcatcactatcgggccggggaatttggcaaattcgatttgctgattttgccagccgctgccgtagttacccaccagatgcgggaattttttcagctcgggatagccgtgtgctggcagcatttcgccatgggtgtacacattgacgccttgtccggcggtctgctccaataacatctgcagatctttcagatcgtgccctgaaatcagaatggctttaccggcgaccgggcgcacgttgaccgccgttggctgcgggtggccgtatgcctgagtttcgccgctgtccagaatcgccatcacgttgaagttcatctggccgatgcccatagcattattcaacagggtatccacatcgcgcggctgagtgcccagccatgacataagctcatgatattgcgcgtagatattttcatcagactgaccgagtacgtgagcgtgttccatataagccgctgcgcctttcaagccatacaaacacagcatccgcagaccgtgaatgtcatcgccaacctcggctttatcactgtttaaagcgaactgttgagactgttgttgcagtgttggaatgtcgttagcttccaattgtaattcggccatcgggtgatctaccgaggcgctggcatccagcaagcggcagcgtgcggccagagaatcacgcagtgcgatagcttccttggcataaccgacgatgcgctcagaatcaaagttaacgttggtcagcgttgagaaaaaggctctgggtgcgaagctatcgatatctggatcgataataccgagctgtctggcgcgtaatgcccaagcggaaagcccctgtaatacggcaaccaacaggtcttgcaaatcggacgtttcagcggttttcccgcacataccctgagcgtaagagcagccattgcctgccggggtacgaatggtttgttcacattgcacacagaacatgattctttccttttaaaagtgcatttgtaatgcgtgtttaaaagcatagatgtgccaaggcatcttaaaaaggcttttgtaatgcaactttaacttatcttgatttggcgcaatttttgtcgcgaatgagactttttcgctttaatggtgaaatgaatagaatttagcgggccaatacattagcccgctggggacggagaatatcaggagaatagcgcgatcagtactggagccagtaagctcaatatgaagccgtgcacgatcgcggcaggtaccatttccaggccaccgctacgttgcaataccggcagggtgaaatccattgaggtggcaccgcagaggcctaaggcagtggaacggctgcggcgaaccagcgttggaatcagcataatggcgactaattcacgggctaaatcgttgaagaaggcggcgctgccgatcaccgggccaaatgcgtctgtcagtaagatacccgagagtgagtaccaaccgtagccggaggccattgccagaccggttttcagcggtaaaccgaggaataacgcggctaacgcgccgccagccagcgcactgacagcaaccacgatggcgacaatagtgccgcggcggttaagcacaatctggcgtaaagtcatgccgctattacgcaactggatgccaaccaaaaatagcaggaatatcaatgctaattcactaccttgagcggcaaattgcaacggtggccattcggtcagacccaatagaaagccgatgataactacgccgcacagtttcagcgattccagcgccatatgtaatcgggaaggcagagcttcctggcggtgagtatttttccacggccttttatgttcgagcaaaaatagcgccaacaggttagcggataaaatgcagataaaacatacgctggcgtattggaaaataagcagcaggtttgcgctaaggttttccagaaatgccaagctgatgcccataaaaaataaaataacgtaaaccatccagcttaatagccggttaatcgcctgaattaaagatttacggctaagcgggatcaaataaccgataattaacggcaacagaatgatcagtaatcctgaatacatgtgagttaaagcgtcctttacgcgtcaggctgaattaagcagacgtaaggctatagccggttggctatagcaatgagatcgggcattgttgagtgaaggggataagctatctaaaaaggcggatagagtaaaggtggaaagaccggcggatggcgcttgacctgaaaggattttttgcgccattctcatgaatgttaacgcgttaatgacataggcttcgctggtaatgatttaacttcgcacgggaggcgtaaatatgttcctagaacgcgtggaaatagtcgggtttcgtggcattaatcgtatttctttgacgctggatgataatacggtactcatcggggagaatgcctggggtaaatccagcctgttggatgcgctcactctgttgctgtctccggaaccgcgactctatcatttcaccgtgcaggatttttattatccccccggtgatgaagcggcaaaagatcggcatcttcaggttattttaaccttctgcgagaaggatatcggccattggcgttccccacgttatcgccatttggcaccgctgtggagccaatgtgaagacagtttgcatcgtatttactaccgagtggaaggcgaactggccgatgacggcaccgtttgtacctggcgcacttttctggatctggatggccagccgttgccactccacgatattgaaaaactggctttaggtattattcgtatccatccagtgctacgcctgcgggatgcccgctttatccgccgtttacgtaccagcgtgccggaaagtatgcctgggcaggataaagttgcgctgaatcagcagttggatcagttagggcgtgaattagtacgtaatccacaaaaactgactaataccgagctacgtcagggattagacgctatgcgccaattgctggaacattactttgccgagcagggttctcaaacgcctcagcgcaatcggccttcgcgcccgcagccggaacgtcaggcgtggcaagcgctggacagcatcaaccgcatgattgccgagccgaacagtcgaagtatgcggctgattttactggggatgtttaatacgttattgcaggctaaaggctcgattcatctggatccgcacgcgcgcccgctgttgctggtggaggatcccgaaacccgcctgcatcccattatgttatcggtcgcctgggggctactcaatcagcttcctttgcaacgcatcaccaccaccaactccggcgaactggtttctttggtaccggtagaacggatttgccgattggtgcgtgagtctgcgcgggtggcaacttaccgtattggcccgaaggggatgacgccggaagacagtcgccgcattgccttccatattcgttttaaccgcccgtcatcactgtttgcccgctgctggctattggtggagggtgagacagaaatctggttgcttaacgaactggctcgccaatgtggctatcactttgaagctgaaggggtaaaagtcatcgagtttgcgcaaagtggtttacgtccattgctaaaattcgccaatcgcatgggcattcagtggcataccctgaccgacggcgacgatgccggtaagaagtatgccgctaccgttcgggatattgcggagcgcaacggtgataatgaacgagatcgcctgaccatgttgccggcgccggatatggagcaattcctatatcgtgcgggatttggcccggtttatcatcgaatatcagcgataccgatgaatgccaaaatgccgccgcgccgggtgattgagaaagcgatacatcgcacttccaagcccgatttggctattgaagttgccactcaggctggggtgtggggcgtgagttcggtaccgccaattctgaaaaagatgttttcccgcgtggtgtggctggctcggggtcgcgcggattaaccgaggtattttcagcacaagggaagtgggcgctaatcccgctttccaattgatccaataactgataacggcggcgatattcagcgcgtttcttgctagggatatcctcaatggctttccgcgctacgcgggcaggcagcagaaaataaccttcctcgctcatttggccgcccagagattgccagaaaccatcataatcggcgtgtaacttatcgcttttccgttgacgatagcgccagcttttatagatatgagtatcattacccaccgctataatctgagtgatccccaacatttcggccagactacaggctgcttccagcaggatacgtttcgggaacaggccgtgacagtttttggtgctgatttgaatttcttcatgagctacctgcggtgcggctccttgtaacccaccaataaacaacgtttttttctgtcgataactcatcaaactaaaggtcatgagcgccagtgtttcaccttgttgattggtaaacatcagcgtggcttccccttctttattgagcatcggcaacgtaccgaggtaaacgcggtactggctgtcattgcgtccgcttaattcggccaatttataaggcttggattggagatatcccgtcgccaatgctgatggcatcaattcattgaccaaccgatagtgctctttgatcgcctgtaatccctgacgtttactgagattggcgctgagatacggacggtgcagtttgcaaggtaaatccggctgagattgcagcagcgtaccgagctgcgggttattcgccaattcactgagtagcgccagagtaacctgaggataaatcagcgttctggccagaaacttaaagcgaaaagccggttttcgccacacctccggcaggttttcttccccttttatcaactgcgaaattaactgccagcgacttaaatgattcggcgctgatgggggtgaagtgaataaatacattggaatatccgtttcgttatcaaactttgtctctattgaagcaagggggaactaaacagcgactcaatgcgtcttatgttggtattatttatatgatttgatgtttatattacgtttaaattcgcgcactctcagagtgataatttaatcagcgctacggtattttcattagcatttgtctatttcaagcataaattttaataaggtaggtaattaatttgacgtggtttagcggacgtaaacgacgctggattctggcgattgtgattctggcaattggcggtttttgggcgatcaagcatggaatggcaccggctgcgacacagtatcaaaccgtcaaagtggttaatcgggatctgcaacaaaacatattagcgataggtaaattggacgcggtgcgcaaagttgatgtgggtgcgcaggtgagcgggcagcttgaacggctctatgtggagatcggcgataaggtcaagcaggggcaactgctggcgatgatcgatccgcagcaggcacagaaccagatcaaagaggtggaagcgacgctgcaagatcttaacgctcagctgttgcaagccaaagccgagcggcagttggcggaggtgacgctgagccgccagcaacaattggcgaagctacaggcggtttctcttcaggttctggatcaggccgcaacggatttggcggtaaaaaaagcaaaagttggcacgatcagcgcacaaatcagcaaaaccaaagccagcctggatacggccaaaattaatctggattacaccaaaatttccgccccgatggacggcgatgtagtgcaaattactacgttgcaaggccagacagtgattgccgcacaacaggcgccaaacattctgacgttggccgatatgcgtacgatgctggtgaatgctcaagtttccgaagcggatgttatccacctgaaaccggggctgaaagcctcattcactgtattgggtgatccgtcgaagcattttgacggtgtactcaaagatattcagccaacgccggaaaaagtgaacgatgccattttctattcggcccgctttgaagtacctaatccggatggcctgctgcgcctgcaaatgaccgctcaggtatcgattcaattatcgaaagtggaacaggctaaagttgtgccactctccgctttgggtaacgaattgggcgtgaaccgttatgaagtcgcggtgctaaaaaatggtaaggaagagaaacgagaagtgaccatcggcattcgcaacaatgtggatgcgcaggtgcttagcggtctggaagtgggtgatgaagtgattaccagccgcggcgtagcggaggctgaataatggcggctttgcttgagttaaaaggcattcgccgcagttatcagtctggtgaacaaacggtggatgtgctgcaggacgtttcgctggaaattaatgcgggtgagctggtggcgattattggtgcttccggctcgggtaagtcgaccctgatgaatattcttggctgtctggataagccaagcgaggggatttaccgcgtggccgggcaggacgtcgatagcatggacaatgatgcgctggcggctttgcgtcgtgaacactttgggtttattttccagcgttatcatttattacctcacctaagtgcggcgcataacgtagaagtgcccgcggtctacgcaggtttaggaaagcatgagcggcgggaacgcgccaaaatgttgctaacccgtttgggattaggcgagcgcatcagctatcgtcccagccagctttccggtggccaacagcagcgcgtcagtattgctcgcgctttgatgaacggcgggcaggtaatattggccgatgaacccaccggcgcgttagacagccattccagcgttgaagtgatggtgattttaaagcaactgcaacagcaggggcacacggtcattattgttacccacgatcctacggtcgcggctcaggccgagcgaatcattgaaatcaaagatggccgtattatggcggactccggcagtaaaacaccgccaaaaaccgcagagccggatacgcaaagtctgacgccgccagcgccttcatggcagcaattgaccgggcgttttcgtgaagcattgctgatggcatggcgcgcgatggcctctaacaagatgcgaactgcgctaactatgctcggtattatcataggtattgcttcggtggtttctattttggtggtgggcgatgcggccaaacaaatggtgttggcagatattcgcgctatcgggacaaataccatcgatatttaccccggaaaagactttggcgatgacgaccccagtaatcggcaggcgctggtttatgacgatatggtagcgctgaaagcgcagtcttacattaatgcggtgtcaccggtgatctctggcagtatgcggctacgcttcggaaatatcgatgtggccggcagtgtatccggagtgagcgcgcagtatttccgtgtttacggtatcagtatcgagcagggcacggcgattacgcaggatcaggtcgatcgacaggcgcaggcggtggtgattgaccgtaatactcagcgccgacttttcccgcatgtgaaagatgtggtggggcaagtgatgctgatcggcaatatgcctgcgactatcgtcggcgtggtggaagaaaaacaatcgatgtttggcagcagtaaatcactgcgggtgtggattccctacaccacaatggctaaccggttgatgggtaaatcttattttgattcgattacggtgcgaatcaacgatggctataatagtaaggaagccgaacaacagttagttcgcttgctaactttgcgtcacggtaagaaagatatctttacctataatatggacagcttgctgcaaactgcggaaaaaatcactcgaaccatgcaattgttcctgacgctggtagcggtcatttcgttggtggttggcggtattggtgtgatgaatattatgctggtatcggtaacggaacgaacccgtgaaataggtattcgcatggccgtaggggcgcgttccagcgatgtcatgcagcaattcctgattgaagcggtgctggtttgtctggtcggcggcgcattagggattacgctttcctttgctatcggtctggcggtagaaatggtgatgcccaactggcaggtatctttccctgcggttgcgctggtcagcgctttcctgtgttcgacaattattggcgtggtcttcggttatttgcccgctcgcagtgccgccagattaaacccaattgacgctttggcgcgggaataacgtttacggacatagaatttacgggaaataggataaacgagcagacgcccaggcggtgttaacgtaatattatggcgttagcgggggcataaaaaatgataaaaatgccagtcgcagttcggctggcattttgaattgctgtgctgccgtagataaaagctaacggcccgacggtgtgacgttgatgtcaggcgagagccagcatttccagaggcacaatcaggctggcatgattgcctttggggccctggtggacatcaaagttaacctgctgacccgcttttagcgttcgataaccatccatctggatagtagagtagtgtgcaaagatatcttcgccgccgttctgcgggcagataaatccaaagcccttggcgttattgaaccatttaacagtacccgtctccatacttctacgttcctcgcaaggctattctaattttagatgaggtaatcgctggttaaagtgagcgcggattggttaaaactccatcagctcacaaatttacactctagtggaaatgcgattaacgtcaagaggacggcttttctcaggctgaggagttcgccaaagtttgatgcagataacgctattgcgcttatttagttacaattttgttgttgtctgtgcgaacgttctcgcatgcttctaaagcgacacttcacggcaagagatgttaaaataacaatagaaatctgtaccaaatggtcttataaccggagctgagtgttgctcctgtatgattcagtgaaacgatgggtaagcaatgggcaataacaacgactggcttaattttgagcatttagtcaaagataaacaaatcgatgcgctaaaaccgccgtctatgtataaagttatactcaacaacgacgattacacgccgatggaatttgtgattgacgttctgcaaaagttcttttcttatgatattgaacgtgcaacccagttgatgctgaacgttcactacaaagggaaagcgatttgcggcgtgttcactgctgaagttgcagagacaaaagtggcgcacgtaaatcaatacgccagggagaacgagcatccattgctttgtacgctggaaaaagcctgattaaggcaatttattggggaggtgcctatgctcaatcaagaacttgaactcagtcttaatatggctttcgccagagcgcgggagcacagacacgagtttatgaccgtggagcacctgttgctggcattgctgagcaaccctgccgcgcgggaagcgctagaggcatgtacggtggatctggtggcattacgccaggagctggaagcctttatagaacaaaccacgccaacgttaccggccagcgaggaagagcgtgacacccaaccaacgctgagcttccagcgcgtattacagcgcgccgtcttccatgttcaatcatctggtcgtaatgaagtttccggtgccaacgttttggtcgccatcttcagcgaacaagagtcccaggcggcttatctgctgcgtaaacacgatgtcagccgtctggatgtggtgaacattatttcccatggtgcacgcaaagacgagccgggtcaggcgccaaatgcagaaaatccggtgaatgaagagcaggcgggaggggaagaccgtatggagaacttcaccaccaatcttaaccaactggcgcgcgtcggcggtatcgatccgctgattggccgcgaaaaagagctggagcgtgcaattcaggtactttgccgccgtcgtaaaaacaatccgctgctggtcggcgaatccggcgtcgggaaaaccgcgattgccgaaggtctggcatggcgaattgtgcagggcgatgtaccggaagtcatggccgaatgtacgctgtactcgttggatatcggctcgctgctggcgggaactaaataccgcggtgactttgagaaacgtttcaaagcgctgctgaaacagctagagcaggataaagacagcattctgttcatcgatgaaattcacaccattatcggcgccggtgctgcttccggtgggcaagtggatgccgcgaacctgatcaaaccgctgttgtccagcggcaagattcgggtgattggctccacgacctatcaggaattcagcaatatctttgaaaaggatcgtgcgttagcgcgccgtttccagaaaattgatattgttgagccgacgcccgaagaaacggtgcaaattatcaatgggttgaaaccgaaatacgaagctcatcacgatgtacgctacacggcgaaagccattcgggcggcggtggaattgtcggtgaaatacatcaacgatcgccatttgccggataaagccattgatgtcattgatgaagctggtgcgcgcagccgattgatgccggcgagcaaacgcaaaaaaaccgtcaacgtttcagatattgaatctgtggtggcgcgtattgctcgtattccggagaaaactgtctctgccagcgatcgtgacgtactgaaaaacctgagcgaccgtttgagtatgttggtcttcgggcaagataaagctatcgacgctctgactgaagcgatcaaaatgagccgcgcgggtttaggtcatgaaaataaacctgtgggttcgttcctgtttgctggcccgaccggggtgggtaaaactgaagtcacagtgcaattggccaaggcgctggatatcgaactgctgcgctttgatatgtccgaatatatggagcgccatacggttagccgcctgattggtgcgcctccgggctacgttggctacgatcagggcggtttgctgaccgacgcggttatcaaacaccctcatgcggttctgttgctggatgagattgaaaaagcgcatcccgatgtctttaacctgttattgcaggtgatggataacggtacgctgacggataacaatggtcgtaaagcggatttccgcaacgtgattgtggtgatgaccaccaacgctggcgtgcgggaaactcagcgtaaatcgattggcttccaacagcaggataacagtaccgatgcgatggaagagatcaaaaaggtgtttacgccggaattccggaaccgtttggataacatcatttggttcaaccatttgtctcctcatgtgattcagcaggttgtcgacaagtttatcgtcgagcttcaggcgcagttggatgccaaaggcgtgtcgctggaggtcagcgatgaagcgcgtaactggctatctgagaagggctacgacaaagctatgggcgcgcggccgatggcgcgggtgattcaggaaaatctgaagaaaccgctggctaacgaactgttgtttggctctttggttgatggcggctcggtgagcgttggtctggataaagagaaacagcaactggcttacgaattccaaagcgcgcaaaaacgcaaaacggaaggcgcggtacattagtcttagcgcaataagctagttgaatcagacgtgaaataaatggaagggcgatagcgatatcgcccttttttttgtactcagtccgactcattcgaaatgggaatggtgcggaaggggtaaataacagaaaaagcaaaacgccctagccaataaaatggtaagggcgccggaggggggactacatcctcagagctcgctagcaactagcgactgggcagccgattaacggctacggaagacaatgcggcctttgctcaggtcgtacggggtcagctctacagtgactttgtcacccgtcaggatgcggatatagtttttacgcattttaccggagatatgagcggttaccacgtgcccgttttccaattcaacacggaacatggtgttcggcagcgtatcaagaacggtgccctgcatttcaatattgtcttctttggccatcgaatcctctaggagtaactaccttagtttttaaccggcaagataatgccgaaaaacccacattatgtaaagaagtgttggcagtcatcacaccatttctgcaaaattagtctgctgaggaggggataaagcctaatgtggggtgcttttgtaacattgatctttacggcatcgcgatttcgacatccagcgattgcggtaaccagcattcagccggtagcggactaaactggagttgactcaagtgctgcaaaaagtggctgcgagggatctctctcgcacccagcgacgcagtgtgagcgttgaggacctgacagtcaatcagttctccaccatgacgggtaaaatgatgacaaaaagccattaatccgctttttgaagcgttctccacccggctaaacattgattctccgcaaaaaagtgcgcccatcccaataccatacaacccgccaacgagttcattatttaaccatacctccaatgaatgagcgtggcccatttcatgtaattgggcgtaggcctgctgtacatcgtcaccaatccaggttccgtcatcgggacgatcggcgcaggcggcgaccacttcacggaacgcctggttcagtgtgaaccgaaatgggcagcggcgcaggaagcgacgcatgctacggctgatatgtaattcttcggggaacagcaccgctcgcgggtccggcgaccaccataaaatcatctcgcccgggctaaaccacgggaaaataccgcgctgataggccgcgagtaaccgtgatgccgataaatcgccacctaacgccaataggccattaggctcgcgcagagccagctcaggtgaagggaacgcgtaagaatgtgatgagaggtgggtaagacgcataaatccccttaacggcgcttacaggcgcttttggctgtagagtattgataatgccgccgttatcccagcggcatttgataacattagccagaaatcgtcttaaactcacaataaaacttagcggcgctgacggaactgataataccggcctttatttttcaataaagtctcatgatcgccctgttcaacgatctggccgccgtccatcacgcaaatgctatccatttgctccagcccatacaggcgatgcgtcaccagaatcagactcttgtgctgacagtgttggcgcagcagcgccagtatttgttgctcggtttccgcatccagaccttcggtcggttcatccaacaataacaatggagcaggatggagcagcgcccgcgcaatacccaaacggcgttgttcgccaccggaaagtgggcgaccgccgtctcccatccaggcatttaacccttcgtcattatccagaagattacccaggccgacttgttgtaacgcggtgattagttgctcatcgctagcggttgggcaggcgagcagcaggttttgtcgcagcgtactgctgaaaacgtgtactcgctggctgactaccgtcatcatctggcgtagagaagcttcgtcgtagctcgccagcggctggccgttgagccggatttcaccctgattgggatcccaggcgcgggtgagtaattgtaatagcgttgatttaccacaacctgtgcgtcccagtagcgcaatatgctctcctgcggccagtgacagcgttatatcctgcaatacaggcaaaggctggtctggataggtaaaactcacctgtgcgacttccagcgctgcctgtgaagcgatctcagggccggtttgggggaaggtgacttccggcttctgtgcaataagctgcgccacgcgctcagcggaagttatcacctgcccaagatgctggaaagcacctgcaaccggcagtagagcctcaaatgacgccatcgaagcaaaaacaaacagggcaatcaatgcgcccggttggctataatcgccgacgccagccgcggccagccacagcattagcgtgacggtcatgccggtcgccagaatcatcaatgcctgcgccaaacctgccagcgaagcctgttgctgctgacgagtcaaccaacgccgttcgatatcttccaaagtatggcgaaaacgtcctaacgcgccgaagaccaacagttcggcctgaccttgcagccaggcggtcagttgtgtgcggtagtggctacggaatacggtgagatcggcaccgataggttgaccggcgcggtagaaaatcagcggcagaattagcagcagccccagtagaatggcacctagggtcaatgccagctcgacatcaaggaaactcagaccgaaggtaacggcagcgatgatcgccagcgcggcgattaacggcgaaatgacccgcagatacagatgatccaacgtatcgacatcagccaccaagcggttgagcacttcactctgacgaaaacgggcaatcccggcaggggagagcggtaaaatgcgctgaaaggtaaatacccgcaaatgcgccagcacccggaaggtagcatcgtggctcaccacgcgctcggcgtagcgtccggcggtgcgtaaaatggctgaaccgcgaacgcccgcggcgggaagcaaatagttaaaggtatacaaacccggcgggccagcgagtgcagtaccagcgaggaaccagccggacagcgtcaataggccaatgctggccagcaaagtaataatagccagcaaaatgccgaggctaatcaagaaccaatgacggcggtaaagcgccagaaatggaagaagcacgcgcatgattaaagctcctcacggcgataagacagcaggttggcgaaaggcccctcagactgactcagtgtggtgtaatccccttgctgaaccagcagcccgcggtccattacccagatttggtcataatctagcgtatcttctaactggtgcgtcaccagtagcgtagtctgcattcgcgaagcctcgtttaatgctttcatcactaattgttcgctgtgggcatccagactggcggttggctcatccaacagcagtagccggcaaggatttaacaaggcgcgcgccacggcgacgcgctgtgcctgaccaacggatagacgagccgaatgatcgccgatttccgtggctaacccgttgggcaaatccccgaggaactcattgacgtaggcacgttcaaccgcctgttgcagctgctgttcgctggcgtcgggctgattgagcagaatattgctggccaaagtctgctccggcaaataagggttttggcctacccagcttagctggctgcgccatgcctgaggggcaagttcgcgcagttcaatgccgttaacccgcagagagccacgataaggcagaaagcccagtaacagattgagtaatgagctttttcctgcgccactctgcccaacaatggcaatgcgctggccgggttgtagcgtgaaattcaacgggccagccaggcgagtgccgttgggtgccagtatttccagttcggcggcttccagcgtgattaaaccttcgtcgggtaggtttttatccccctgaccgatagcttcgccttcgctggcgaggaacgtcactaatgattccgccgcgccaacggcctgcgctttggcgtgatagaaggtgccgagatcgcgcagtggttggtaaaactcaggagccagaatcagcaccagaaaaccggcaaacagggtgacgcccaatccgtagctgccaaaattcaattcgccaagataggaaaaaccgaaataaaccgcgacaacggcaatagaaatagcggcgaaaaattcgagaaccgccgaggaaaggaaggccatgcgcagcacttccatggtccggctgcggaaatcttcggaagaatcacggatttggtcggtttcggccttcgcccgatgaaataagcgcaaggtgtccaaaccgcgcaagcgatcgaggaaattgccgctcaatcgcgccagtgcaacaaagttgcggcggttagcatctgctgcgcccatgccgactagcgccatgaaaatcgggatcagcggagcggtgacgaacaaaatgagtcctgcggcccagttaatcgggaaaatcgcaatcaaaatcaacagcggaatcagaccggccagatacatttgtggtaaatagcgcgaatagtaatcctgcatttcctcaatttgttcaagaataatggtcgcccaactgccggctggtttgccttttacccaggatggcccgagttgttcaaggcgatccagcacgattttacgaatctgcaatcgcaccttcatgccgcagataaaacctacccgctcccgtagccaactgaccacggcgcgcgctgcgaaagttccagccagcagcaagaagtcgttggtcagagcctctcgcggcatctgatccataatcagcgcctgcaataatccggctaataaccaggcttgagcgatgatcaataacccgctgagcaaaccaagtagcatggaaaggcggagccaacgttgcgcgggggcgctttgttttttcagccaacgaatcaactcatattgtcttgttttattcatcaggcaattattctgcgcaggaaatgggatgataaatttatcaatagatgtctgctccccgaagagggcaaaccggcgaaaggcaatgttaccttgtccctacgccttgtgaaaacaaataagggggaaatagtggttttaaacaagtttaagaaaaatacaggaagaggttattttgatttacctcattgattgtaaatcaaaaagtagaaatgattcgttttttggtttttatttcatcgattattactgaaaccaaccaatcacaattaaataacaagtgattgacatggggagtggcgagttaaataggttttttgcactgttattttatattgttgccaactgtatctttactttttaattaaacggattgcaggtaatccatgaggcttggccgttttgaacgcacgaacaactcggcggagatataaataaagtgaagccacgaataaaaaggcgactcatcttgcgattgagccgcctgtttcttcgagctagcctgagtcgttcttcaggccgggtcgattacttatcgttgaccaagccgtccagataacgctccgcgtctaacgcagccatacagccggtgcccgcggaggtaatcgcctgacgataaatatgatccatgacgtcgccggcggcaaatacgccaggtacggaagtctgggtcgcgttgccctgaatgccagactgcactttgatgtagccgttttcccgttccaactgatcgccgaaaattgcggtgtttgggctgtggccgatggcgataaatacgccagcaactgccagttcttcggtttcatcggtttgggttgaacgcaaacgcacgccggtaacgcccatttgatcgcccaacacttcatccaaagtgcggtcggtgtgcaacacgatattgccgttcttcactttttccatcagacggtcgatcaggattttttccgaacggaaagtatcacggcggtgaattagatgtacttcttccgcaatgtttgccagatataacgcttcttcaaccgcagtgttaccgccgccgactaccgcgactttctggccacgatagaagaaaccgtcgcaggttgcgcaagcggaaacgcctttgcctttaaaggcttcttcagattccatccccagataacgggccgatgcccctgtggcgatgatcagagcatcacaggtatattcttcgctatcgccgaatagacggaacggacgctgttgcagatcgactttattgatatggtcgaaaagaatttcggtttggaatttcgctgcgtgttcgtgcatacgttccatcagcgccgggccggttagaccttctgggtcaccgggccagttttcaacttcggtggtggttgtcagctggccgcctttttccatcccggtaatcaaaacgggcttcagattggcgcgggcggcataaactgccgcggtgtaacccgcaggacctgaaccaagaataattaatttgctgtgcttagccgtgctcatgaatacctctttcccacaatggcggacaatgttagggattgtagggaaaatgtgacagtaaaaaaagcgaacaaaaatgttgttagcgatttgtttgataggtgatgactattttctcagcgaaatgcattaagaataagcagttaggagagaaacctatcggatggggcttttttaatcgcggctacatttgctctcggacatggctgtccgcaagtggttggccttaaccctacgaattttgtgccctcatctgtcacttccacccgaattcagcggaattttctctctgaacatgaggtaaaaaaagcgtaaaaacgaggggaaaatgagcgagtgagattttttatctggcacgttctactgatttaacttcttttactttgacaatcggctgtgcatttgcgaaaacatcataggaagaagaaattatctgcgcgccataatttcagaattggtatcactgatatcaatcgaaaaccctggaacgttttcgattaatgctgggtggctacgtgcagtgatttctcggtatcgttggaaaacatcccattcggcaccgcgatgttttcatctctttcgggacgctaataatcatcgagtacctcgcatgcggttggacagacagggtgtgagataggaacatgttgatatatttgcacaaaaacaggctgtgggtctttgtctgtggcaggctcagaacaccgacttccggttagggcatgtggcggattcaaggaaattaagagagacaataagatgatagacaataagaaacgcccggggaaggagcttgaccgtattgaccgtaacatcctgaatgagcttcagaaggatggtcggatctcaaacgtagagctttcaaaacgtgtaggtttatcgcctacgccgtgtctggaacgtgttcgccgcttagagcgccaggatttcattcagggctacactgcgctgttaaatccgcaatatctggacgctgcactgttggttgttgttgagattactctgaatcgtggtgcgccagatgtgtttgaacaatttaacaccgcagtgcaaaaacttgatgaaattcaagagtgtcacttggtttccggcgattttgactatttgctgaaaacccgcgtgccagacatgtctgcctaccgtaaattgcttggtgaaaccttgctgcgtctgccgggagtgaacgacacccgtacttacgtagttatggaagaagtaaaacagagcaatcgtcttgtgatcaagacgcgctaaacgggcaggtgcaaaacctgagtaatttggttacactcctgtttattcatacagtttcagcgccgggaaggtttctcggcgttgtttctattaccaattcacaggacctggagagcctttcttgagccaggaatatacagaagataaagaagttaccctgaagaaactcagcaacgggcgtcgtttacttgaagccgtactgattgtggtaactattttggcagcgtacctgatggccgcgctgatcagtttcaacccttccgatccaagctggtcacagaccgcatggcatgaacctattcataatctgggtggcagcgttggcgcctggatggccgatacgttgttcttcacctttggtgtgctggcttacgccattccgccgatcatggtgatgttgtgctgggccgcattccgccagcgtgatgacagcgatcatatcgactatttcagcctctctctcaaactgatcggcacgctggcgctgattttgacatcctgcgggctggctgcgctgaatgtcgatgatttgtactactttgcttccggcggtgtgattggcagcctgttcagtaacgcgatgctgccgtggttcaacggcgtgggcgcgacgctgacgctgctgtgtatctgggcggtaggcttaaccctgtttaccggctggtcatggctagttattgccgaaaaaatcggtggggtagtgctgggttctttggcctttctgaccaaccgttcccgcagatctgagcgtcaaagagatgaagatgacgattatctggatgccgaaattgccgatgaacccgacgctcaacccggcgtagccgcatcggtcgttgctgcgacaacagccaacgcgagtgatgacgttgatgatgtcctgttctcggcaccatcgctgactaaaatcccaacggaaagtcctggtgaaaatgccgctgttgctccggttatccctgatgctgcgccacagacggcagcagcgccttatgatgatccgcttctgagcacgatgagggcaacagacgttgatgagacacagactcagcatcagccgtgggcttcgacagaaacggcgccggctgaaactgcgtcagcgcaaaatgttagccacagcgcatcgccaatgaccgagaatctggcgacaccgccgctatattccttcgaaattcctgaagaaacaccggcaccgatccgcccaaccgccgagcctgagaaacgtgagccgcaaatgggcacatgggatgccgatccgcagccgtcgccgtttgattttaccgccgctcagcgccacagcgatcgcgtggaatcaacgccttatatgaatcctggtttcggtgacgagtcgggcgctgaaagctcaccttcggctgtcaccggctctattcctgcagtgggtcatggggtgtccacggccgccgcggcaacctttatgccagcgtttaccgctataagtgacagtaactcccagattaaacagggtattggccctgagttgcctcgtcctaaccctgtgcgtattcctacccgtcgtgaaatggcttcttatggtatcaagttgccgtcacagcgcatggcagagcaggagcaacgcgctcgtcagggcgatgagcctcagcctagcgcgccgcaaagtgtggaagcgcagcacgacgaagatgcgttgcaacaggccatgctgcgtaaagctttcgccgatcgggaaaaccagcgctacggtgaaaattatgccgcagagccagagccgcagatcgaaccggaagatgaacaagcgttgcaggacgcggagctgcgtcaggcctttgctgctcaacagcaaagtcgttacgggatatcttctgaatctgagccagtcgtggtgccaagtcgcccggttgatacgcataatgcattcaccttctcgccggttgcggatttggtcgacgatacgccgcgcgaaccgctgtttacgctgtcaccttataccgaagagcccacgcagccggaaccgcagtatcaggctgaacctccagtgcagcagccagccgcacccgtctatcagcagccggtggctcctcagcctgcggcaccagcggagtcggcctattcgacagcccagaatgcgccgacttatccgacggctgctccgcaggcaccggccgcacctcaaccggtaccgcagcctgttcctgctatggacagcctgattcatccgttcctgatgcgtaacgatcagccgctgcaaaaaccaacgacaccactgccgacgctggatctgctggcttctccgccagaagaggaagaaccggtggatatgtttgccttggagcaaactgcgcgtttggttgaagcgcgtcttggagattatcgggtcaaagccgaagtggtgggaatatcgccggggccggtgattacccgcttcgagctggatttggctccaggggtgaaagcttcacgtatttctaacctgtcgcgcgatttggcgcgttctctctctgccattgcggtgcgcgtggtggaagtgattccaggtaagccttatgtcgggttggagttaccgaataaacgtcgccagaccgtctatctacgagaagtgctggactgcgctaaattccgtgataacacttcgccgctggctattgtgctgggtaaagacattgccgggcagccggtggtggcggatctgggcaaaatgccacacttactggttgcgggtacgacgggttccggtaaatcggtcggtgttaacgccatgatcctgagtatcttgtataaagcgactccggatgaagttcgtttcatcatgatcgacccgaaaatgctggaactgtcagtgtatgaaggtattcctcatttgttgaccgaagtggttaccgatatgaaggatgccgctaatgcgctgcgctggtgtgtgggcgaaatggaacgacgttataagctgatgtccgcgcttggcgtgcgtaatttagcgggttataacgaacgcgtggcgcaggctgaagctatggggcgtccgattcccgatccgttctggaaaccaggcgacggcatggatatcgaaccgccaatgctggtgaaactgccatacatcgtggtgatggtagatgaatttgccgatttgatgatgaccgtcggtaagaaagtggaagagctgattgcccgtttggcgcagaaagcgcgtgccgcaggtattcatctggtgctggcgactcagcgtccatcggtggatgtgatcaccggcttgattaaagctaacataccgactcggattgcctttaccgtgtccagcaagatcgattcccgtaccattctcgatcagggcggtgcagaatcgttgttgggcatgggtgatatgctgtatatggcgccaaactcatcgataccggtgcgagtgcacggtgcctttgtacgcgatcaggaagtgcatgcggtggttaacgactggaaggctcgcgggcgtccgcagtacatcgaaagcatccttaacggcagtgatgacagcgaaggcggtagtttagggctggatagcgatgaagaactggatccgctgttcgatcaggctgtcagctttgtgttggaaaaacgccgagcctctatttccggggttcaacgccagttccgcattggttataaccgagctgcccgtattatcgaacagatggaagcccagcaaatcgttagtccgcaaggccataacggtaaccgtgaggtgttagctccaccgcctcatgaataatcgttatcaatgatcggatcatgacgtataaaagggccgcattgcggcccttgagctaaaagataaagcgcgtttaaattgataattaaagcttttcagcggtcgttctaaggtttcaggctacgaccagaaagattggtaacattgacgcacaatcattcttttagtgaatgctgtgcaaagaagcgtaaaccatgctgtttatcagattattgtgctatagctgaataataggcttcggctagagtgcagatagttaattattgaataggtccctatggcaatatttgccggggtaatagcatttacaaggtatttggaatcatgaaaaagctgctcgttgcctgctgtttgctctccagtgttatttccgcctccgctttggccgatgcaagccaggatcttcaaggccgcctgagcaaagtgaacagtttccacgctaagttctcgcagtacgtgaccagcgctgacggcgcggcggtacaagaaggtgaaggcgacctgtgggtaaaacgcccaaatctgttcaactggcatatgacttcgccagacgaaagcgtgcttatctctgacggcgaaacgctgtggttctataatccttttgttgaacaggcgacggcaacctggttgaaaaactcaaccggcaacacaccgtttatgctgattacccgcaataatccggatgactggaaacagtacaatgtgaaacagaaaggcgatgattttgagctgacgccaaaagcgccgagcggtaatctgaaacagttcgccatcagcgtgacgccaggcggcacgatcaaaggctttaccgccgtcgaacaagacggccagcgcagcgcctatgtgctgaaaggccagcaaaacagcacgttcgatgccagcaaattcaagtttaccccgccgaagggggttacgctggacgaccagcgccagtgaggtgtgagtgagtaatctatccctcgatttttctcaaaacgagtttcagccattggccgcgcgtatgcggcctttaacgttggctgaatatatcggacagcagcatttattagctccgggtaaaccattgccacgtgcgattgaagcagggcaactgcattcgatgatcctatgggggccgccgggaaccggtaaaaccacgttagctgaaattattggccgctatgggcaggcagatgtggagcgtatctctgccgtgacctccgggatcaaagagatccgcgaagcgatcgagcgggcgcgtcaaaaccgtgatgctgggcggcggactattctgtttgttgatgaagtacatcgcttcaacaaaagccagcaggatgcgtttttgcctcatattgaagacggtactattacttttatcggtgccaccaccgaaaatccctctttcgaactcaattcggctttgctttctcgagcccgggtctatttgctgaaagcgctgacagcggcagatatcgagaaagtgatcgatcaggcgatgtctgatagtacccgcggtttgggcggtcagaatatcaagttactggatgaaacccgccgcatgatgtcggagttggtgggaggagacgctcgccgggcgctaaatagcctggaaatgatggcggatatggctgaaattgatgccaaaggtgtgcgagtactgactcctgaattattgaaagaagtttcgggggagcgtagcgctcgctttgataacaaaggcgaccgctattacgatctgatttcggcgctgcataagtcggtacgaggctcggcgccggatgccgcgctgtattggtacgcccgtattattaccgccggtggcgatccgctatatgtagcccggcgtttgttagccattgcttcggaagacgtcggcaatgccgatcctcgcgcgatgcaagtcgctatttctgcctgggattgcttcacccgcgtcggcccggcagaaggtgaaagagccatcgcccaagccattgtttatcttgcctgtgcgcccaagagtaatgcggtttataccgctttcaaagcggcgatgcgtgatgcacgtgaaatgcctgattttgatgtgccagaacatctgcggaacgcaccaaccaaattaatgaaggaaatggggctgggcgcggagtatcgttatgctcatgacgaacaaaatgcctacgcggccggtgagaactatttcccgccggaaatggcggcaacccgctactattcgccgacttcacgcggtcttgaaggtaaaataggtgaaaagctggcatggttggctgagcaggatcaaaatagcccgataaaacgctaccgctagccttgtcgttgcggtaaggttatctttataactacttggtaagcggagaatacttcgcttacgtcagtaagatttcttctaacaaccctttatttttttaactacaagcacaggactagcatgctcgatcccaatatgctgcgcaatgagctagacgcagtcgcagaaaaacttgctcgcagaggttttaaacttgatgttgatacgttgcgcgcacaagaagcacgccgcaaagttttacagaccgaaacagaaaatctgcaggcagaacgtaactctcgatcgaaaatgatcggtgcggcaaaagctcgtggtgaagatatcgagccattacgtcttgaagttaatgcgttgggtgaccagctggatgccgctaaagcggaattggaaacgctgcaaaacgaaattcgcgatttggcgctttctattcctaacctgccggatgattctgtgccagtcggtaaagatgagaacgacaatctggaagtgagccgttggggcgaaccgcgccagtatgattttgacgttcgcgatcacgttgctctaggtgaaatggctggcggtctggattttgctgctgcggttaagctgaccggcgcgcgttttgtggtgatgaaagggcaaattgcccgtatgcatcgcgcattagcgcagttcatgctggatctgcacactgaaaagcacggctatctggaaacttacgttccgtatctggttaaccacgccacgctttacggcactggccaattacctaaatttggtggcgatctgttccacaccaaaccgctggaagaagagtctgacagcagcaactacgcgctgattccaacggcagaagtgccagtaaccaacctggtacgcgacgagattctggaagaagaatccctgccactgaaaatgactgcccatacgccgtgtttccgttcagaagccggttcttatggtcgggatacccgtggtctgattcgtatgcatcagttcgataaagtcgaaatggtacagatcactcgtccagaagattccatggatgcgctggaagaactgaccggccacgcggagaaagtactgcaattgctgggtctgccttatcgtaaaatgttgctgtgcaccggcgacatgggcttcggttcaagcaaaacctacgatctggaagtgtggctgcccgcgcagaacacttaccgcgaaatctcctcatgttccaatatgtgggatttccaggcgcgtcgtatgcaagcgcgctgccgtaacaaagttgaccgtaaaccacgtctggttcataccctgaatggttctggtctggctgttggccgtactttagtcgcggtactggaaaactatcagcaagcggatggtcgtattcaggttcccgaagtattacgtccgtacatgggcggcttggaatacattggcggctaagccatagatttcagctgttgatgttcaaagcctcgcattgcggggctttttaatggcctaaatttgggcgtttatttcggaatatctcctgagatgggggaagttcctgaaagtaaaagtggagaaactcaacattttgtttgcaggcttattgtttgatgagatagcataaaaaccacgctggtagcatatcgtgctattaccactgtcagagcaattgacttttttatcaccagtggcatgatgcgctcactttccatcgcgccaacggtcctcgtttcactatgtccgcatactctcgcccagtgctattgttgctctgtgggcttttgctatttacagtttcaatcgcggtattaaatacattagttcccctgtggcttagccaccagcatttgccagtgtggcaagtgggtatggtaagttcttcatatttcagcggtaatcttgcgggaaccttgatcgctggccgacttattcagcgtttgggctttaatcgcagctatcactactcttgcctgttatttgcggcggcgacctgcgggctgatgctgtcagtcgatttctggagctggttgggctggcgttttatggccggtgtagcctgcgcgttgatttgggtaattgtagaaagcgcattgttacgcagcggcacgccaactaatcgtggacagctattggcggcgtatatgacgatatattatctgggcaccgtgggtggccaactgctcttgggcatggtctctacccagttggccagcgtgattccttgggtgagcgcgttggtgattactgcgatgttgccacttctatttgctcacttcgctaatcagtcggctgaaaccacccatgtgaaggtttggccgatgtttaagcgtcgtagcgctcgcttgggtatcaatggctgtattatctcaggtatcgtgctgggatcgctctacgggctaatgccgctgtatttatcccatcaggggatgagcgatgccaacgtcggatggtggatggcgctgctggtcagttcggggatcttcggacaatggccggtagggcgcatggccgatcgctatggtcgcctgctggtgctgcgtattcaggtatttgtcgtgatattgggctgtatcgcgatgctcagtaactatgcgatggcgccagcgctatttattctgggggcggcaggttttacgctctatccagtcgctatggcctgggcctgtgaaaaagccagttccgatgagttagtggcgatgaatcaggctttattgatgagttacaccatcggcagtctggctgggccgaccatgacatcaatgctgatgcagaatttttctgataatttattattcgtgatgattgcgggagtggcattggtgtatctgatgatgctgctgaagaaaccggatcagcaacacacgccttttgcggcggtgtaacgctctctgccagccggttgcgaaatcccggctggcagaataaacggtaagtcagtaaatcactttgtgaccgtaactttccaggatacctttcactcgatccataatttctttggatggtggcttaacgccgtccagcttatattcttcgcccatggctacccatttatgcttgcctaactcatggtaaggtagcaattcgattttctcgatgttagtcatattttgggtaaactcacctaacatatgggcggatttatcgtcatctgaccaacccggaaccacaacgtagcgaatccaggttttctggttgcgtttcgccagataacgagcgaattccagagtacgatggttagacacgccgaccagattttgatgaatggaatcatccatttgtttcagatccaacatcaccaaatcggtttcatccagcaattcatcaatcaccggatcgtaacggcgaacaaatccgttggtatccagacaggtatgaatgccttctttatgacaagcgcggaaccagtcacgcacaaattcagcctgtaaaatggcttcgccgccggatgcggtcacgccgccgccggatgcgttcataaagtgtcggtaggtcacggcttctttgaccagctcttcaaccgtcacttccttaccgccgtgggtatcccaagtgtcgcggttgtgacagtacaggcaacgcatcaaacagccttgaaagaaaacgataaagcggatgccgggaccatcaacggtgccacaggattcaaatgagtgaatgcgaccaagtacagacattgcagggggttctccaaattgaccgttcaatagcagtcgaaatcaacataacggcggcagggcaggaggaaggggatgcccttgttagctcggtgattcgggcgatcacaacgtctgagctggcactcctgctgccgacgctaggtcggataaaactgttttgccgggcacccactcagggtagatggctggcaaaacagacttttctggcaagtacatcgtgcggtggttggtgaaaatagctgtgcttgataagtaaaggccccacagtcgtggagcctttaagtttatacccttcggacttgaagcaacagggttgttagcggatacacgagcctaaatcagcgacttaagtcagttcatcgggctttgttttcttgctacctgtccgtcactccaaattctttgcgtatcgggttattaaatcgactgagtgaaagtacgagtaataacatcctgttgctgttctttggtcagcgcgttgaagcgtactgcgtaacccgatacacggatggtcagctgcggatatttttccggattttccatcgcgtctaacagcatttcacggttcatcacgttcacgttcaggtgttgaccaccttcgatggacgcttcgtgatggaagtaaccgtccatcagacccgctaagttagctttacgcacttcgtcatctttacccaaagcgtttggtacgatggagaaggtataagaaataccatctttcgcataggcaaacggcagtttggcaacggaagtcagagaggcaacagcacctttctggtcacgaccgtgcattgggttagcacctggaccgaatggggcacccgcgcgacgaccgtctggggtgttaccggttttcttaccataaaccacgttagaggtaatggtcagaactgactgagttggtaccgcgttacggtaggtacgcagcttctgaattttcttcatgaagcgctcaaccaggtcacaggcgatgtcatcaacgcgagaatcgttgttaccgaactgtggatattcgccttcgatgttgaagtcgactgccagaccatcttcatcacgaatagtcgttactttcgcgtatttgatagcagacagggagtcagcagcaacggacagacctgcgataccgcaagccatggtgcgatatacatcacggtcatgcagagccatcagcgcagcttcgtagctgtacttgtcatgcatgtagtgaatgatgttcagcgaagtcacgtattgtttagccagccaatccatgaagtggtccatgcgttccatgactttgtcatagtccagcacttcgtccatcattggcgcttctttcgggcctacctgaattttcagtttttcgtcaacgccgccgttgattgcgtacaacatggttttcgccaggttggcacgagcgccgaagaactgcatttgtttaccgacgatcattgggctgacgcaacatgcaatggcatagtcatcgttgttgaagtcaggacgcatcaaatcatcgttttcatactgtacagatgaggtgtcgatagaaactttcgctgcgaacttcttgaagttcaacggcagtttctcagaccacagaatggtcatgttcggctctggagatggccccatggtgtacagggtattcaggaagcggaagctggttttagttaccagagtacgaccgtcaacgcccataccagccagagactcagttgcccagattgggtcaccggagaacagctcatcgtattcaggggtacgcaggaagcgaaccatacgcagtttcatcaccagatggtcaatcaactcttgcgcttcgatttcggtcagtttgccggctttcatgtcgcgttcaatgtacacgtccaggaaagtagacacgcggccgaaggacatcgctgcaccgttctgggatttcaccgcggccaggtagccgaagtaagtccactgtaccgcttcacgggcgttagtcgcaggacgagaaatatcgcagccgtatttagctgccatttctttgatttgacccagtgcacgatgctgttcagcaatttcttcgcgcagttggatggtcatttccagatcttcgccgttttccagacgtgactgtaatgaattgaactgagccagtttgtctttcatcaggaagtcgataccgtaaacggctacgcgacgatagtcaccgatgatacgaccacgaccataagcatccggcagaccggtcaggataccggatttacggcagttcaggatgtctttggtgtaaacatcgaatacgccctggttatgggttttgcggtattcggtgaacacttttttcagctgtggatccagctcacgaccgtaaactttgcaggagttttcaaccattttgatgccgccgaatggaatcagggcgcgtttcaatggtgcttcagtctgcaaaccaacgatggtttccaaatctttgctaatgtaaccagcgtcgtgggagatgatggttgatgctacgtcggtatcgaagtcaactggcgcatgagtgcggttttccagtttgatgccttccatgaccttggcccacagctcatcggttgctttggtagagccggccaggaaggattcgtcaccttcatatggggtgtagttcttctggatgaagtcacgaacgtttacttcgttctgccagtcaccctcggtaaaaccttgccatgcgttggccaatttttcattaagttcggtcataatgcatctaccttttaatgtgaatttcttcgaaaaccagacgtagcggccacactttaatgttgctggtcaccgcgcagataaattacccaataagttaaccctaccaataacccgccaccaatgatgttaccgatggtaacaggaatgaggttgtcgataacaaagttacttacggtcagattagcaaattgctcaggtgttgctcctatggcttgccagaactcaggcgaagcgaagtttttaatcactatgcccataggaatcataaacatgttggcgatgctatgttcaaagccgctggcgacaaacataccgactggcagaatcatcgcgaacattttgtccataatggtacggccggagtaactcatccataccgctaagcacaccatcaggttagctaaaatgcccaaacatactgcttgaataaaagtatggtgcaatttgtgatctgcggtttgcagcacattcaagccccattggccgttggcaaccatgtattgaccggcaaaccagatcagggcgacaaaaaacagcgctccggccaggtttccaacgtaaacattcacccagttagtccccaactgacgccaggtaatccggccgctggctttcgctacggtggttaatacggtggaagtaaagaggtcgccgccgcataccacgactaacatcaaacccagtgagaagcagataccgccaactaatttcgcaaagccgaaaggaacgcccgcggtgccagtagtagctgtaatgtaaaatacaaaagcgattgagataaacacgcccgcagtaattgccagatagaaagttttcatcggatgcttggtggctttgtagacaccggcatcttcggctactttcgccatggccgcaggtagtaatgcatcgaaggggttgtcagctttcacactaactctctctttagggttaataaagcacaacgagatactagcaaagcagtatagcgtgaaaattgacgtggatcatattgggccactttaatcagccataaacacctgcaatctcaatggttaatcatgttatttcattgatatttaaagagaaaaaatattttaagatttacaaaaaattttgattaaacgttcaattcgatgaagaaaaggttaataaatagcgtaatttgtagattatcgccttcaaccacgctattaaaaattaactatttatttacctgcccataagaatgcgagctttaggcggaattatttgtctaaaagtgccattttctcccaaaaataataactgttttttgatgaaaaaataattctggcgatgggaatttctgcataaataataattcaggcgctgagatgtctatttattaagcgcacagtttatataactcggtgctttatataactcggcgcttatagaacatacagcgataaaaatgaggatagataaatgtagggtaaaaaaacggcgaacccataggattcgccgtcgcttgatgagatagcagttttcagaactggaacaaagctattagttttttgcccagtaacgacgcttggccgcttgcaacttctcataggctcccaacagcgcctgatgtgccggtaatgctttcaaatcaggatcgatgctaaacagcccgtggaagcgaacttcgccacaaagggcggcagaagcggcatccacagcatcttgaccgtacattttcatgaatgcgccatgatattgggcaggatcgcgatccggctcttgagtcagcagcagcaaggtttgcaggcaacggtaatagttagcctgttcaggagtaaatacggaggcgttgaaatcctgcgtccactcaacccaaatcaacgcttgctccaaatcaccaccggctagcgccagcatggatttcagctcgccaacgcgcagggtataccagccgttgtctttcccagaggcgatgcccagcagttcacgaacgcgggcaaaatcatccagaccttcgtcgtccagctgttcgatcaattgcagatactgctctggcttccactcggtgcctggcaacgccagcagagtgtcacgcagatgtacgcccatagtgttattggccatcagcaaatcttctgccggatagatgtcggacatacccggtaccagaatacggcaggcgtaaacgcccaaatgctcataatctgcaatgtaaacttcagcatcttcctgtttgaagatcgccatcagcgtagcgaattcttcttcggttgtgccgctgaaattccagtcaacgaacggatagtctgcgtcctgcttgaacatatcccagctaattaaaccgctggaatcgataaagtgagtttccagattggtgtgttcggccacttcttcgtcatcgaaggttggagcggtgaaaacatccaaatctttcaggctgcggccttgcaacaattcggtcacggtgcgctccagcgctacgccgaagtcaggatgcgcgccgaatgaagcaaaacaagttccgttagaagggttgaataagacgacgcaaataaccgggtaagcgccgcccaaagaggcgtcataagaaaggattgggaaaccttcctcttccagttttgcaatggcttcaactacgccagggtagcggttcagcacctcttgcgggatttcgggcaggctgatggattccgcaataatgcggtttttcacatagcgttcgaaaacttctgacaaaccttggacacgtgcttcattggcggtattaccagcagacataccattagacacataaagatttcctatgatattcataggaatatatactgtctccaggtcagattgacgggtaaagggcagggaacagattccgcgctcaacgttacctgactgtaagtccaccagatcattggcatttagctctttgtctgggtcataaaaagcgtgcagccgggcatcgagaatgccttgtggcagggagccatcagccggaatagggaaccacttctcattgggataatgaacgaactcaccgttggcgatttctttacccaaataaaaatcagcgaagaaatagttagttgataaacgctcaaaatattcacccagagcggaggccagtgcggcctttttgctcgcgcctttgccgttggtaaaacacagcggacagtcgcgatcgcggatatgcactgaccaaacatgaggaaccggattgagccaggaagcttcttcaatattaaaaccgagatcgctcagtttttgctgaaaacgggaaatggagtcttccagcgcagcgtctttgccggggataaaagtttgcgtcatgtttttcactttttgaccgtactaaaaacgcgcaatcatacggggttttggccgatagctccatgtattcctaaagcacaatatatgtcacagtatttgtgtggatttaccggataattcattcatttataaaaaagggagttggcaagatgaagtctttaaaattaaccgttttggcagggattttggcagggattagtggttcggccttggctatgccgaatattacgctgttagcgaccggcggcaccattgctggcggcggcgattcagccaccaaatccaactacaccgcggggaaaattggtgtggatgccttggttaatgcagttccggaaatcaaaaacattgccaacgtacacggcgagcaattggtcaatatcggttcccaagacatgaatgacgatgtctggttgaaactggctaagagaatcaatgcagactgtgcaaaaaccgatggttttgtgattactcacggtaccgatactctggaagaaacggcttacttcctcgatttgacggtaaaatgcgataaacctgtggttgtggttggcgcaatgcgcccagctacagcaatgggcgctgatggcccactgaatctttataatgcagtggttgttgccagtgatccgcagtcagccaagcgcggcgtcttggtggcaatgaacgatgtggtattggatggccgcgatgtgaccaagaccagcaccacttcagtacagaccttccagtcaccaaacaccggtaccgtcggcttgatccatgacggtaaagtgaattatctgcacgcaagcgaacacaaacaaactccgtttgacgtcaccaaactgacgaccttgccgaaagttggcatcgtttatagctatgcaaacgcgtccgatcttccagccaaagcctttatcgccgatggttatcagggcatcgtcagcgccggtgtgggtaatggcaacatgtaccacagcgtcttcgacactctggcaactgcggcacacaatggcgtcgccgtggtgcgttcttctcgcgtaccaaccggttctaccacgcaggatgctgaagttgacgataccaagtacggttttgtggcttctggcctgttgaatccgcaaaaagctcgcgtattgctgcaattagccttaacgcagaccaaaaatccgcaggaaattcaaaaaatgttcctgacttactaagtcgttcattttattaattcgggggcggctcgctgcccctttttaccccgaatcctttttcgcaccaaaacccgccgctaacgcgcacctgacgtcattcaagctcaaattgagttatctatcgcgtagtgagtcgcatagtcattaactttcagcgaataattctgcatgaaatgccaataggcgggcgaaccgctataaaacgccgggacgctttcgaccttctggatgaataagcgttgcagccgttgaatgcgaatgataaaaccgatgtatgggttaaaacgatgattatctcagtgaaagcggtgaggggaaatgacacaggtttacaattttagcgctggcccagcaatgctgccggtggaagttctgcgtcgtgcacaacaagaattatgcaactggcatggcattggcacctcagtgatggaaatcagccatcgcagtaaagaattcattcaagtggccgagcaatccgaacaggatctgcgggatctgttgaaaattcctgataattataaagtgctgttttgccacggcggagccagagcgcaatttgccgcagtgccgcagaatctgctgggtgataaaacctcggcagattacatcgatggcggctattgggcacacagcgccattaatgaagctcagaaatattgcgagccaaatgttattgatattaaagcacaaattgatggtctgaccggcgttctgcctatgagccaatggcagttaagcgcggatgcagcctatgtgcattattgcccgaacgaaaccatcgacggcgtggcgatccatgaagatcccgattttggcgataaaatcgtggtggccgattattcctcatcgattctttcccgtcctattgatatcagccgctatggcctgatttacgctggcgcacagaagaatatcgggcctgcgggtttgacgttggtgattgttcgtgaagacctgctgggcaaagcgcacaaacatgtgccgtctattttggattatcaggtattggcgaagaatgactcgatgttcaacacgccgccaaccttcgcctggtatctttccggcatggtctttaagtggttgaaagagcagggcggtctggtggaaatggaaaaacgtaaccgcgccaaagccgaattactttatagtgctattgatagcagcgatttttatcgcaatcaggtggccacggccaaccgttcctggatgaatattccgttccaactggctaaaccggaactggataacgttttcctcagtgaagccgaagcgttgggcctgcaagcgttgaaaggccatcgggttgcaggcggtatgcgggcgtccatttataacgctatgccgattgaaggcgttaaagtattaactgattttatggttgactttgaacgtcgccatgcctgatagcgtttcagggatttcctgctttatcggcagttattttcccaatgtatttagcggtatgtgccgccattttttgcctcaaaacagccccgttcatgcggggttgttgattaatagaagactggagagtgtttttcccatgctggaatccctgacgttacaacccatcgcgctgattgacggcaccgttaatcttcccggctccaaaagtgtgtctaatcgcgccctgctgctggcggcactggctgaggggacaacccggctaaacaatctgttagatagcgatgatattcgccatatgctgaatgccctgaaaacgttgggcgttaattatcgtctttccgccgatcgcacccaatgtgagattgacgggctggggagcccgctgttggccgctgagccggtagagttattcctcggtaacgcaggcaccgcaatgcgcccattggctgctgctttgtgcctgagccacggcgacgtgatattaaccggcgagccacgtatgaaagaacgcccaataggccatttggtggacgcattgcgtcagggcggcgcgcagattgattatctggaacaggaaaattatccgccgctgcgtattcgcggtggtttccgcggcggcgagctgaccgttgacggcagcgtatccagccagttcctgacggcgctgttgatggcagcacctttggctgcgcaggatacgcaaattcgtattcaaggcgatttggtttccaaaccttatatcgatattactttgcatttgatgcaaagctttggcgttgaagtgacgcacgaaaactatcagatcttctatattgcgggcggccaaacttatcgttcgccgggtgaatatctggtagaaggcgatgcgtcctccgcctcttacttcctcgctgcggcagcgatcaaaggtggcactgtacgtgtgaccggaatcggtaagaaaagcgtgcagggcgataccaaatttgctgacgtattggaaaaaatgggtgcaatcatccgttggggtgatgattatatcgaatgtagccgaggggagttacgaggcatcgatatggacatgaaccatattcccgatgcggcgatgaccattgctaccaccgcgctgtttgccgaagggccaacaatcattcgcaatatttataactggcgggtaaaagaaaccgatcgtctggcagccatggccaccgaactgcgtaaagttggagcagaagtggaagaaggccacgactatattcgcgtgcttccacctgcgcagctgatcgcggcagagatcggcacttataacgatcatcgtatggcgatgtgtttctcgctggtggcgttatcggatacgccggtcactattctcgatccgaaatgtaccgcaaaaaccttccctgactatttcgaacagttggctcgcttaagccaaaccgcatgattctgctggtttaagcatggtttgtattaaagtatgcttcttattaataaatgggcgggataaccttcccatttatacaaattgaaaatatgttcagcaaaacacatcaattttccctaaacttattcaacgtggtgtggttttattttcagcaactacacctcgcagggtaacagttctcgcagatgcggcgtataatgtcgcacctgtgtttacccgatggggtagacaagaggttttgcctaccgaaaggagagagaaatgacggcgatagccccggtgataaccgttgatggaccgagtggtgcaggcaaaggcacgctgtgtaaagcactggctgaaacgctgaaatggcgtttactggattcaggtgcaatctaccgcgttttagccttggctgcgttgcatcatcaggtcgatatcagcaccgaagaggcactggttccacttgccgcccatctcgacgtccgttttgtcgcagaaaacggagaattacgcgttattcttgaaggtgaggatgtcagcaatgctatccgcactgaaacagtgggtaataccgcctctcaggcagccgctttcccgcgtgttcgtgaggcgctgttgcgccgtcagcgggcatttcgcgaagcgccgggtctgattgccgacggcagagatatgggaaccgtagtgtttcccgatgcgccagtgaagatatttcttgatgccagttcggaagaacgagcacacagacgcatgctacagttgcaggaaaagggctttaatgttaactttgaacgtcttttagccgagatacaggagcgagatgatcgcgatcgtaatcggtctatagcgcctttagtacccgcagccgatgcgttaatactggattcaaccagtatgtccatcgagcaggtgattgaacaagcgctggcgtatgcccaaaaagttttagcgttgccgtcgtgttaataacgtcagcgtagcaagaaccgagctcttaataacttgttattaaagggcaaattaaccttactgccaaggatggacggcgaggcatgtgaaacaaccccattaggcaggatgcccgatggacgttaaacttaagaatcctgaagattattaacatgacagaatcttttgctcaactctttgaagaatccctgaaaacaattgaaacacgtccgggctctatcgtccgtggtgttgttgtttctatcgataaagatatcgtactggttgacgccggtctgaaatccgaatccgcaattccagcagaacagttcaagaacgcgcaaggcgaactggaaattcaggttggcgacgaagttgacgttgcactggacgcagttgaagatggcttcggtgaaactcagctgtcccgtgagaaagctaagcgtcacgaagcatggctgactctggaaaaagctttcgaagttgctgcaactgtaatcggcgtgatcaacggtaaagtgaagggcggcttcacagtcgaactgaacggcatccgtgcgttcctgccaggttcactggttgacgtgcgtccagttcgcgatactctgcatctggaaggcaaagagcttgagttcaaagtcatcaagctggatcagaaacgcaacaacgtagttgtttctcgtcgtgccgttatcgaatcagaaaacagcgcagaacgcgatcaattgctggaaaacctgcaagaaggcatggaagttaaaggtatcgttaagaacctgactgactacggtgcattcgttgatctgggcggcgttgatggcttgctgcacattactgacatggcttggaaacgcgttaagcatccaagcgaaatcgtcaatgtgggcgacgaaatcactgttaaagtgctgaagttcgaccgcgaacgtactcgtgtatccctgggcttgaaacagctgggcgaagatccatgggttgctatcgctaaacgttacccagaaagcactaagctgactggtcgtgtaaccaacctgactgattacggctgcttcgtagaaatcgaagaaggcgttgaaggtctggtacacgtttctgaaatggattggaccaacaaaaacattcacccgtctaaagttgttaacgtaggcgacgtagtggaagttatggttctggacatcgatgaagaacgtcgtcgtatttctctgggcctgaaacagtgcaaatctaacccatggcagctgtttgcagaaactcacaacaaaaacgaccgcgttgaaggtaaaatcaagtctatcactgacttcggtatcttcatcggcttggacggcggcatcgacggcctggttcacctgtctgacatctcctggaacgttgcaggcgaagaagcagttcgtgaatacaagaaaggtgacgagatcgcagctgttgttctgcaagttgacgcagagcgcgagcgcatctccctgggcgtgaaacaactggcagaagacccgttcaataactacctgtctatgaacaagaaaggtgctattgttactggtaaagtaactgcagttgacgctaaaggtgctacagttgaattggcaggcggcgtagaaggttacctgcgtgcttctgaagcaactcgtgaccgcgttgaagatgcaacgctggtactgaacgtaggtgatgaagttgaagccaaatatactggcgttgaccgtaaaaaccgcgtaattagcctgtctgttcgtgcgaaagacgaagctgatgagaaagatgcaatcgctactgttaacagtaagccagaagaaagcaacttctctaacgctatggctgaagcgttcaaagctgcaaaaggcgagtaataacggggggcggtttctccgcccctatacggtagtttagctgcaaagcttggaggtaatatgaccaagtctgaacttattgaaagacttgctggccagcaatctcatgtaccggcgaaggccgttgaggatgcagtgaaagaaatgcttgaacatatggctggaacattagccgaaggtgagcgcattgagatccgcggatttggcagtttttctcttcactaccgtgctccgcgtgttggtcgtaatccgaaaactggcgataaagtagagttggaaggtaaatacgttccgcactttaagccgggtaaagaattacgtgatcgcgctaatatctacggttaagttgttcgcaaccagccgggttattgcttgtgaaaatatgaaacggtgcctttatggcgccgtttttctttttataatcatcgaattctgataaaaacctctttgccaaataacgcctttatttccagctcacttatcctgcactgaattaaaaactcgttttttaagttaatccttccccctgtattcactttcactctgagttaaaccaatcatccgctgttttcctcacgttatttctttctaactagtcactattttttgaagtttgtcgcaattccatttgggtatttgcaaccgctgaaactcgctttcgaggctcctcggaggatttagtcttgatgctggtaaagcacgctttaatactgaaaatacgcttagcggcaggatgctgtgaaaagaccaatagctaattatcaaaggatgattttttactgtgttatcaatcgatcgatgtgctggggcgttaattataggtttgctaccactgatgtttatcccacgcttaccgggtactgtgccagttttattattgctgtttaccgccattatcctgtggcttagcggttataaaaacgctcggtttgcggctttgccaatattgagctttttatggggaaactggcaggctgccggtctggtgaatcaaatagagtatatggttcagggagataagttgatcgttgctactgttgccagcatttctttaattagccatagggaggagagcgccagaatgctattgaaaatcgagcaggcagatggtcgtcgagtctttccaccggtttccgtttcggtccattggccaaaaaaatggcctgcatcctgttctggtcagcgctggcagctaaagatccgcatgaggccagtacacagcttgcttaatgaaggcggattcgatagccaacgttgggcaatggccaatcgacggcctctgaccgggcgaattatcactgggcggatgttggaggggaattgtcatttacggcaggacatcatctctagaacagatcggcaattgcagtcctatagtcagaggtccttgctattagcgctggcttttggcgagcggggggaattatcactacagcagtgggagactttgcgaaaaaccggcactgcgcatcttatggctatttcgggtctacatattgttatggcggcgttatttggccgtttattagcgagagcgattcaatatttatttccgacgcgctggataggccccttattgccattactttgcgggtggctgctcgcattaacctatgtttggctagcgggtgctaacccaccggcattgcgggcaggattggttttaacgctgtggttagctttacggctgtttggcgttctatccagcccttggcaggtttggctatgggcggtggcactgatactgcttagtgagcctttaacactgctatcagatagtttttggttatcctgtatggcagtactgagtttgctgttttggctgcactgggttccactactttccccatttctaacgaaaaatcgctatgcctggccactccgcctggcgcatttacaatttgggatgatgttgttactcatgccgttgcaaatgctcctatttcatggcattagcctatcctcgtttcccgcgaatttatgggcgatgccaatagtgtcatttatcaccgttcccttggtgttagtagcattggtattttcatttttctcctcatttgcggaagtcttctggtcgttggccaatagctcgctagagatcgctatgctgcctttaaacaacttaaaagcaggctggcagcacactggcgaaacggcgatggcgattggctgtctaggctggctgggcgtagtgatatggcgtttccggtggtggagtttatatcctttcgccgttattgctctctgcgtcaatttgattcttatcgctcaacggcgagatacccaccgatggcgagttgatatgctggatattggacatggtttagccatcgttatagagcgggaacgcagggcggtgatatttgataccggtaatcgctggaggacgggcagcatggcggaaaaagcgattttgccgtatctcaaatggcgaggtttaacggtggatcatattattctgagtcacgatcatttggatcattccggcgggttagagttgattcgcgctgcctttcctatggctaaagtgagggcaccttttcccataaagaatattgaacccaataggtggttattaccctgtcggcgaggggatcgctggcagtggcagcagcttgattttgaggtgctctggccgccacaattgaccgaaaatgcgcaaaacgacgattcctgcgtcattcgcatttcagagggcaagcatagtctgctgcttaccggagatattgaaaggaaaagcgagcgacagctggttaaaacatcccgccataaattgcggtctacgttgctacaggttccacatcatgggagcaatacctcgtctatcgctccttttctccgcgcggtacagcctgaattagctatggcatcggcatcacgttataaccaatggcacttgccagcgaaaaaagtcatcaatcgttacaaagaaaatgggattatctggcgtgatacatcgcgctctgggcagctcagtatctctttctcagaccatgattggcagattaaaggttatagagaacaattatttccccgttggtaccaccagcgatttggtgttgggagccataatgagtagaataggccgctatttcttctggtactggtatttgaatgatgaatgataaagatctctccacctggcagaccttccgtcgcctttggccgatgatcgctccttttaaaaccggtcttatcgctgcggcgatagcgctaattctgaatgcggccagcgatacctttatgctgtcgttgttaaaaccgttgctggatgatggttttggtaagtcgaacagttctatcctgatgtggatgccactggccattattggattgatgttggttcgcgggatcagcggttttatctccagctactgtatttcatgggtttcgggcaaagtggtgatgcatatgcgccgccgcctgtttagccatatgatgggcatgccagtatcttttttcgatcaacaatctacaggcacattgctgtcgcggattacttatgattccgagcaggtggcttcttcttcttccagcgcgttgattaccgtagtgagagaaggtgcgtcgattatcggcctgtttatcatgatgttttattacagctggcagttgtcgctgattttaatcgttattgcgccgatcgtttccatcgctattcgcatggtatccaagcgcttccgtaatatcagtaagaatatgcaaagcaccatggggcaggtgacgaccagcgctgagcagatgctgaaagggcataaagaagtattgatcttcggcggtcaaaaagtagaaaccgaacgttttgataccgtgagtaaccggatgcgtcagcagggcatgaaaatggtttctgcctcttctatttccgatcctattattcagttgattgcttcatttgcgctggcatttgtgctttatgctgccagtttcccaagcgtgatggaaacgctgactgccggtactattaccgtggttttctcttccatgattgccttgatgcgtccgttgaagtctctgactaacgtcaacgcccagttccaacgcggtatggcggcctgtcagacgttattcagtattctggatatggaacaggaaaaagacgacggcaaattagaaatcgatcgcgtaaaaggggatatcgatttccgtaatgtgacctttaaatacccaggcaaagaaacgccagcgctgatagatatcaatatgcatatcgaagccggtaaaaccgtagccttggtagggcgttcaggctcgggtaaatcaacgattgctaacctgattactcgtttttatgacgtcagctccggcagtatcctgatggatggccacgacctgcgggaatacaaacttagttctctgcgtaatcaggtggcgctggtttcgcaaaacgtacatctattcaacgataccgtcgctaataacattgcctatgccagagatgaacaatatacccgcgcagagatagaaaaagcggcgcgcatggcctatgccatggactttattgagaaaatggataacggtctggatacggtgattggtgaaaacggcgtgatgctttctggtggtcagcgccagcgtattgctattgcccgcgcattactgcgtgactgcccgattctgattttggatgaagcgacttcggctttggatactgaatctgagcgagctattcaggcggcgttggatgaattgcagaaaaaccgcacctcgttggtgattgctcaccgtctgtcgacgattgaaaaagccgatgaaattctggttattgaagacggccgcattatcgaacgtggggaacacagcgagctgctcgctcgtcaaggcgcctatgctcagcttagccgcatgcagtttggccaatgattgagcgtatctggtcaggcgaatcgcgactgtattggctgttattaccgctatcctggctgtacggtgggattagctggttgataaaaagcagttatcgactgggtttgcgtactagctggcgttcccctgtacccgtcgtggtggtggggaatctgactgctggtggcaacggcaagacgccagtcgttatctggctggtggagcaactgcggctgcggggtcaacgcgttggcgttgtttctcgtggttacggtggaaaagccgatagctacccgttggtgctgaatgaaaatacaccaacgacgcaggctggcgatgagccggtgttgatattccaacgtaccggtgcgcctgtagccgttgcgccgaaacgctcggaggcgattcaggctctgctaaaaaaccatgctcttgatgtgattatcaccgacgatggtttacagcattatgctttgcaacgagattttgaaattgtggtggtggacggcgttcgtcgatttggtaacggctggtggttgcctgccgggccaatgcgtgaaaggcctgagcgattggcatccgtggatgccattatcacgaacggcggaaccgcggctgcgggagaagtgccaatgctgctaaaagcggggcatgcggtgaatattctgactggtgagcaattgcctgctgaacagctaaagaatatcgttgccatggctggtatcgggcatccgccacgctttttccgaaccttacgtcaattaggggttacgatagagaaagaacacgcttttgctgatcatcaggatttttcgctgtcccagctccagagtctgaccagtgatagtcaaaccctgttaatgaccgagaaagatgcggttaaatgctgcaagtttgctcagcctaattggtggtatctgccggtaacggcagaattaccgccagcacagaccgagcaattattggctcggattatttcgctacgtagcgctgacgattagcgcatcacctaatccgataaaatctcaggcaaacctagaatctgagcacaggccgctatcgagcggcgctgtgtatcttcatacagtgccagttcatcgataaccggcgtgcctaaatctcgctcaaacgcttcccgactggagtgttcgctaaagtgcgtgcgcgctttatctcccaggttcgactgaaatattcctgcggcactgactggcagaaaatcctcatacaccaaaggttcaaagtcgatataaccgctattgataagatcgtcaagagaagcactgttgcggttttttagctcgatatctggcattttccccgttggaaaatagcggtagaaggccagtttctgcgagcgcatcgcctcgtgatcatcagggaaggcgctaaagtgatgagacagcagtgccatatacctattggcatttttctcacaggcgggctgttgcagttcatcctgtgcggcttgtaataagcgatcgtataatgcacgccctttggcggttagagcggcgccacgctgttcgatttcgccgaaacgtgcagtatgcttaccctgaatgctctgtccatttgcttgtgggaaagcaacctgctcttccaacgctttgaaactggtttggcgcagcaaaatagggcagcggcgggctggcgggccttcgattaccgctttaggcgtaatactatgctccggcattgctcgttgaacggcgtcgatatccagcgttcgtggcgttaaatgattaatgtgcggccctttaaatgcgactacgtcggcaatcaggcggtgctggtcgtgcaggcgttgatatatctcggcgttcacggtcgcagcattgtgccagcggaaagtttctaaagcctgagtgataaagtcgtcagcttcttgccgagtcaaaccgccagcgatttcatgacgtttaatcagctcaagagcgcgtggggtaaaaatagtgcggcgcgccagtatttccgccgctagctgacgtaattccggttgttcgatcagttccagccgcagcagggaagtgaataccctaaacgggctggcctgaagcgatgtctcgtggatggcgcgaaacgcggtggaatgtactggcactcccgctggagccagatcgtaataggccacaggaaccatgcccatcacagcaaacaggcggcgtaacatcgctagttcggcggcggttccgacgcggattgcgccgtgccgctccatattcagccgctcaatttcgccagtgcgggctaagtgttttttcagttccggatgttcagccatcgcctgctgattggtttgggcaacaatctgcaatagggtgctgtaaagaggaacttcagtttggtacatctcggacatggcacgagagaatccagcgcgaatctgatctggctgaatcagctgtggggtgttcataatagggtaactccttttatcgtctatattttttactgtttttcttagtacgaaaatggcttagaaaaaatagggatacatcaacgctaagctgccttttagtctaggcaggaaacgcagagtcgaggacaacccgcaggagaatattgaggaattatgcgccagctctcattgattcttatttcggcaataaaatagaagagaaaatagttgcgcggctatttattttatgcgttaatagccgcggcctgtgatgcagacctatttatgtgtaagcgtgtgtagtgagagtataaagagtactagcagttcctcccaagccgttatcatttgattccgcttcaaagacgaaccttctaagaatctccggtaaacaacttccataagtaacgttcctgaatacagtccagctattttagatagcaataagtgccttatggcgagttataaatatttttgaaggtaaagtttatgtctaagaagactggtcaagttaaatggttcaacgaaagcaaaggttttggttttattgaacaaaacgacggtggcaaagatgtattcgtacatttctctgcaatcgccactgacggattcaaaactctggctgaaggccagcgtgtagaatacaccgttgaagacagcccgcgcgggccggctgctgcaaacgttgttgctctgtaattcagagattaataatgtttaaaatattttaggataaaaaatggtaaagcaaatgcgctaaccgttgacctgaatatttaaaaattctaagacccgcattatgcgggttttttcattaattcaagctcatagaggtttaatcaaaaaactttaggatgggcaactgcatctaaacaataaataaaaatgagttgttaggatgcccagtaaaaggaaatttattatgacgttaaaaatgggtcgggtgaaatggttcaaccagctgaaaggctacggttttatttcaccactcgatggtgggctggatgtttatgtcagcaaaatggcaattgccaacaccaaaaataaatcactaagtgaaggacagaacgtagagttctccacttacaaaagtattcacgggccttctgcggccgatgtgattgctttttaaagcgaacggctaccaaggtagccgtttgtattttaccgatacttcgatatgcgatggtaatacaggtgctctttatttggttaattaaaatctgaattttattcgattcttaatgactaaagttagcgaacatcgcgatgattttatgaaacagtttcatcttcaatccaagaaataaattgtgtgatgtaagtcacaaaattctactccccgtatttcaacatatcaataacattcaccgaaaaatgccatttttctttgttgccgttcttgatgagttatcgctcgcagtaatggaatattgagttggttaacctgcctgagtggatatgctattctcttacgctttcctgctgtcgatagctccacgtcctcggagggtgtatggatcaccgtttactcgaaatcgttgcttgcccagtgtgcaatggcaaactgtattttaataaagaaaatctggagttggtgtgcaaagccgacaatctggcttaccccgttcgcgatggcattccggttttgctggagaatgaagcgcgcgccctttccgttgatgagaagcacgcatgagttttatcgcgattattcctgctcgttatgcttcaacccggctgccgggtaaaccgctggcggacattggcggtaagccgatggtggtacatgtgatggagcgcgcactggagtctggtgccagtcgggtgattgtcgccaccgatcatgatgacgtggttcgtgccgtgcaggccgcaggcggcgaagtttgtctgactcgcgccgatcatcagtccggtactgagcggctggccgaagtgattgaacgctacggtttcgctgatgacgatattattgtcaacgtacaaggcgatgaaccgctcattcctccggtgattatcagccaggtagctagcaatctggcggcttccagcgccggtatggcgacattggcagtgccaattgaaagcagcgaagaagcttttaatcccaacgcagtgaaagtggtgatggatgctcagggctacgcgctgtatttctcccgcgcggcgattccgtgggaaagagagcgttttgctcagtctaaagacagcatcggtgactgcttcttacgtcacatcgggatttacgcttatcgcgccggttttattcgccgctatgttaattgggcgccaagtaagctggaacagatcgagctgctcgaacaactgcgggttttatggtacggagagaaaattcacgttgccgtggcgaaagccgcgccggcggtgggcgtagatacccaggaagacctgcaaagagtacgggatattctactcaataaatcaagtagatagaaagtcgcgccgaaaccctaggtcgattgtaaaaccaaaattgtaaaaagatagcaaaaccaaacgccggagtgctggtcacccggcgtaattatttccccgcctttttgttgtttgcccgcttttgtttgatctgcattctggaaatatccccaagctcatctcattatggtgttctaccgcaatcgtcattctgctgtcagtcataatgggcaaacctagtatggaacagttaaaggccgaattaagtattgtattgggtgaatccattacccggcttgaatgtgtcagtgagcagccttatgcccatttgtttgcaatttatgacaaacaggggcacgcgatcccgttattggcgaaaagctatgtttgtcagggcattgcccagcaggaggcctataaactgtcgatgctggcgcgggacggagatattcgtttacctacggtctatggtttggtgatgacccatcagactccttacaaagaaattctgctaatggaacgactaaggggcgtctcagtggaagcgcccccacggacgccagaacgctggaatgtattgatggatcaaatcgttgaaggcgtactggcctggcatcgcattgatagccacggctgcgtcggcaatgtagacagtatgcaggaaaatgattggtttagctggtatcaacagcgggtagaggtgttatggtccagtttaagcaacctcagctcaccgctagtcactctggacgaccgtgccgttttataccgttctagggcgggattatctcagctttttgccgattttgacgacagttgcgtgctgattcacggtaatttaactctgagaagtatgctgaaagatccccgtagcgatcagttattagcgatgttaaatcccggctcggtgctgtgggctccgcgcgaatacgatcttttccgtctgagcgaagaagggatgccaagccagctattgtaccgctatttgcagaaagccccggtttctgaggcttttgtctaccgccgctggctgtacacgctttgggaattagtcggacgatttattcacaccggctatttcgaccggccactgtttgatcgcgcagccagccaactattgccttggcttgcctgatttccctttccttagggttaatgacttggagcgtcggcgggggatttcacccattgccagagtttccctaaggtttcgtaccaggcacgttcactgtgataaagatagctggcggcgggaatagcgcgttcccagctgtgtaacgggctggtaatggctaattgatttgctggggcgggaataggatgtaatcccttggcagtaaagaaattaatggcgcgcggcaggtgattagccgaagtgaccaacaggaaaggtttatctcccaccagagtggccacgtctgccgcttcttcttcggtatctttcggtttttccaacatcacaatatcactgctcgctacgcccagactttgagcaacctgcgcagcggttcgggcgctgctttgcgaagcggggccaaagccgccggtaaataccagtttgctgcccggatgctgtaaatacagtcgaataccttcagtgactcttggcaaactattgggaaataaattcgcgctgggtgcccaattcggattaaaggtatagccgccaccgaggacaacaatgtaatctacccgatcattaccctgataagtggcatacttattttcgataggtagcaataaacgatcggccacgggttgcaggctaataagcaataatactaaccagcttagggtgagcagcgccttgccacttttttgccagtgggtaaaccataataggattaaagccaaacctattaatataagtaaaagtggtagcggcattaataacccgccgaggaacttttttagggtgaatagcatgaaaaagtgaaccttttggctgaaaaaacggcatccgggcgggattactgcccaagaagatttattctacgtctggctgtgccaaaatagcatatttggggcgaactctttttcccctgtcgttatatacccgcgaagtttcgtaccctggcttacaggcgatagagcgaaagtgaaaaggtatagatttcattaacggagcagttgtccatgcagcaggatcgcaatttcgatgatattgccgaaaaattctcgcgtaatatctacggcacgacgaagggaatgattcgtcaggccgtggtttggcaagatatcaccgagctgttgacacagttgccgcagcgaccgctaaggattctcgacgcgggcggtggtgaaggacatatggcctgtcagttggctgcccttggacatcaggtaatgttgtgcgacctttccggcgagatgattcagcgcgcgcaggcggctgcgcaggaaaaaggagtgagccacaacatgcaatttatacaaagtgcggctcaggatatcacccaacatttggaacagccggttgatctggtattgtttcacgcggtgttggagtggattgcggaacccgaagaggttttacaggtactttgtgatgcattaacccccggcggcgccctgtccctgatgtttttcaattcaaacggcctggtgatgcgaaacgccgtgttgggtaacttccaactggctacgcctgatgtgaaaagacgccgccgacgttctctgtcgccgcagtatcctttggacccgcctaaggtttatggctggcttgagcaaatggggatgaccattagcggcaagacgggagtgcgggtgttccacgattacttaaagaacaaacagcagcaggtggaagaatttgctgagctactggcgctggaacagcgctattgtcggcaggaaccctttattagtttggggcgctacgtgcatgttatggcgtttaagccgaacctgaaggaccaactatgagtgaattttcccagacagtacccgaactggtcgcctgggcgcgaaaaaatgatttctcgatttcgctgccaacggagcgtttggcatttattctggccattgccaccttaaacggtgagcggttggacggcgaaatgagcgaaggcgagctgatcgatgcgtttcgtcacgtcagtaaaggctttgaacaaacccacgaaaccgttgccgtacgggccaataacgccattaatgatatggttcggcagcgtcttcttaaccgattcaccagcgaactggcggatggcaatgccatttaccgactaacgccgctgggcatcggcattaccgattattatattcgtcaacgtgaattctctacgctgcgtctttccatgcagttatctattgtggcgcaagagttacagcgcgcggcggaagcggcagaagagggcggcgacgaattccactggcatcgtaacgtctttgccccgctgaaatattccgtcgcagaaatcttcgatagtatcgatatgacccagcgcctgatggatgagcagcaaaacagcgtgaaagaagatatcgccgctttgctcaatcaggactggcgcgcggcgattgccagctgtgagctgttgttgtctgaaacttccggtaccctgcgcgagctgcaagatacgctggaagccgccggggataaattacaggctaatctactgcgtattcaggaagctactatcggtaatgcaggtttggatctggttgataagctggtgtttgatttgcaaagcaaactggatcgcattattagctggggacagcaggccatcgatctgtggatcggttacgatcgccacgtgcataaatttattcgtaccgctatcgatatggataaaaaccgcgtattcgctcagcgtttacgtcagtcggtacagaattactttgataacccgtggacactgacctacgccaacgccgaccgcatgctggatatgcgtgatgaagaactggctctgcgtagtgaggaagtgaccggggaactgccgccggatctcgaatttgaagagttcaacgaaatccgcgaacaaattgccgccatgattgaacaggcgctgctggtgtatcaacaacagcagataccgcttaatctgggggaagtgatgcgcgattatcttgcgcaatatccgcgtgctcgtcattttgacgtggctcgtatcctggtcgaccaggcggttcgcctcggtgtggccgaagccgatttttcagggttaccggcggaatggctggcgattaatgattacggagccaaggtgcaggcacatgtcatcgacaaatattgagttagtaatgccagttaaactggcgcaggcattgagcaattcgctgtttcctgcattggacagtcagctgcgagctggccgacatattggcatagatgagttggacaaccacgccttcctgatggattttcaggatcagttggaagaattttatacccgctataacgttgagctgattcgtgcgccggaaggtttcttctatttgcgtccgcgttcaaccacgctgatcccgcgttcggtcttgtccgaactggacatgatggtgggtaaaattctgtgctatctctatctcagcccggaacgtctggctcacgaggggattttcagccagcaggaaatgtatgaagagttgctgagtctggcggatgagagcaagttgctgaagtttgttaaccagcgctctaccggttccgatctggataagcaaaagttgcaggagaaagtccgtacttctctcaaccgcttacgtcgtttaggtatgctctactttatgggcaacgacagcagcaaattccgcattactgaagcggtattccgttttggtgccgatgtgcgcagcggcgatgacccgcgggaagcgcagttacgtatgattcgtgatggcgaagcgatggcggtggaaaacagtctgtcgctgcaagacgataacgacgagaacgaatcaacccaggcgaatgccgcggaaagtgcagaggatgaacaggaatgattgaacgcggtaaatttcgctcactcacgctggtaaactggaacggtttctttgcccgcaccttcgatctggatgagttggttactacgctgtccggcggtaacggagccggtaaatccaccaccatggcggctttcgtgacggcattgattcccgatctgactttgctgcatttccgtaacaccaccgaagccggtgccaccagcggttcccgcgataaagggttacacgggaaactgcgtgccggggtgtgttattccacgctggatgtgatcaattcccgtcaccagcgcgtggtggtcggggtgcgcttgcagcaggtggccggtcgcgatcgtaaagttgatatcaaacctttcaccattcagggcttgccaacggcgattcagccgacgcagatcctcaccgaagtggtaggcgagcgtcaggcgcgagtgctttctctgcaagagctgaaagagcgtgtggaagaaatggaaggggtgcagtttaagcaatttaactccatcaccgattatcactccctgatgtttgatttgggtgtgattccaaaacgcctgcgttcttctgccgatcgcagcaagttttaccgattgattgaagcctctctgtatggcgggatttccagcgccattacccgctcgctgcgcgactatctgttgccggaaaacagtggcgtgcgtaaagccttccaggacatggaagccgcgctgcgggaaaaccgcatgacgctggaagcgattcgcgtgactcaatcggatcgtgatctgttcaagcatttgatttccgaagccacttcctacgtggcggcggattatatgcgtcacgccaacgagcgccggattcatctggacggcgcgttagtgctgcgccgcgatttacttagcagccgcaagcagttggtgactgagcagtatcgtcacgtagaaatgtcccgcgagctggcggaacaaagcgccgctgaatccgatttggaaaccgattatcaggccgccagcgaccacctgaatttggtgcaaacggcgatgcgtcagcaggaaaaaatcgagcgttatcagagcgatttggaagagttgacttaccgcttggaagaacagaacgaagtggtggccgaagccagcgaacagcaggcggaaaacgaagcccgtgcggaagcggccgagcaagaagtggatgagctgaaaagccagctggcagattatcagcaggcgctggatgtgcagcaaactcgcgccattcagtatcagcaagctttacaggctttggagcgcgcgcgcgcgctgtgtcagatcccggatttgactgctgacaacgccgaagattggctggacactttccatgctaaagagcaggaagctacggaatcgctgctgttgctggaacaaaagctcagcgtggctgatgcggcgcacagtcagtttgaacaggcttatcagctggtggttaatattgccggtcaggtgagccgcagcgaagcctggcagaccgcacgggaattattgcgtgattggccgtcgcagcaacatctggcggagcgagtacaaccgctgcgtatgcgtttgtctgagctggagcagcgcctgcgttctcagcaggatgccgagcgtctgttgcaggagttctgtaagcgtcagggccaggtttatcagcctgaagagctggaagaattacagcgtgagctggagcaaaaagttgaggaattgtccctcagcgtgtccgatgccggtgaacgccgcatggaaatgcgccaggaactggaacagattaagcagaaaattcagacgctaaccagccgtgcgcccatctggcttgcggcgcaggacgcactgaatcaactgagtgagcaaagtggggtatcgctggaagacagccgtcaggtgacggaatacatgcagcaactgcttgagcgcgaacgtgaaactaccgttgagcgcgatgaagtcgcggcacgtaaacgtcagattgaagcgcaaattgagcgtctgagccagccaagtggtgcggaagatccgcgcatggtggcgttagccgagcgtttcggcggcgtattgctgtctgaaatctatgacgatgtcactatcgacgatgcgccgtacttctccgcgctctacggtccatctcgccacggtatcgtggtaccggatctgtcgctggttcgcgatcagttggtggggctggaagactgtccggaagacttgtatctgatcgaaggagacccgcagtcctttgatgacagcgtatttgccgtcgaagaacatgaaaaagcggtggtggtgaaaatcgccgatcgccaatggcgttattcccgctatccggaagtgccgctgtttggccgcgcggcgcgggaaaatcgtctggaaaccctgcacgccgagcgtgacagtctggcggaacgttatgccacgctttccttcgacgtacagaaaacccagcgcgcccatcaggcattcagccgctttattggttctcatctggcggtggctttcgatgcggatccagaagctgaaattcgcctgctgaatacccgtcgcggtgaaattgagcgcgctctgagtgctcacgaagatcaaaatcagcagcagcgtcagcagtttgaacaggctaaagaaggcattgcggcgctgaatcgactgattccgctggtgtctttgctgcttgacgacgctttgcaggatcgggtggaagaaatcagcgaagagttggctgaagcgcaggaagcggcgcgtcatattcagcagcacggtaatgctctgatcaagctggagcctttactggcggtgctgcaaagcgatccgcagcagcatgaacagctgaaagaaagctatattcaggcgcaaaacagtcagcgtcaggccaagcagcaggcctttgccttaacggaagtggttcagcgccgggctcacttcagctataccgattctgccggtatgctgaatgaaaactccgatctgaacgacaaactgcgtcaacgtctggagcacgcggaagccgatcgtactcgcgctcgcgagcaattacgtcaataccagacccagttcactcagtacagtcaggtactggcgtcactgaaaagttcttatgatgctaagcgggatatgctcaaagagctgacccaggaattgcaggatattggcgttcaggccgatgcgaatgcagaagcgcgtgcgcgagctcgtcgcgatgaattgcatgcggcgctcagcaccaaccgttcacgtcgtaatcagctggaaaaacagttgaccttctgtgaagcggaaatggatagcctgcaaaagaaactgcgcaaactggagcgagattatcaccagattcgcgagcaggtggtgaatgccaaatccggctggtgcgcggtgatgcgtatggtgaaagataacggcgtcgagcgtcgcttacatcgtcgtgaactggcgtatatggacggcgaagaactgcgttcgatgtcggataaagccctaggcgcactgcgtctggcagtatctgataacgaacatctgcgcgatgtgctgcgtctgtcggaagatccgaagcgtccggaacgcaaaattcagttctatatcgcggtttaccagcatctgcgcgagcgtattcgtcaggatattattcgcaccgacgatccggttgaagccattgaacagatggaaatcgagctgggtcgcctgaccgaagaactgactgcccgtgaacaaaaactggcaattagctccaaaagtgtggcgaatatcatccgcaaaaccattcagcgcgagcagaaccgtattcgtatgctgaaccaaggcttgcaggcggtttccttcggacaggtgaaaagcgtgcggttgaacgtgaatgtacgagaagcccatgccactttactggatgtgctgtctgagcagcaggagcagcatcaggatctgtttaacagcaaccgtctgaccttctcggaggcgctggccaaactgtatcaacgcctgaacccgcaaatggatatggggcagcgtttgccgcaaaccatcggtgaggagctgttagattaccgtaactaccttgagctggaagttgaagttttccgtggcgcagacggttggctacgcgcggagagcggggcgttgtctaccggtgaagctatcggtaccggtatgtctattctggtgatggtggtgcagagttgggaagaggaatctcgtcgcctgcgcgggaaagatatttctccttgtcgcttgctgttccttgatgaagccgcacgactggatgcgaaatctattgcgacgctgttcgagctgtgtgaacgattggaaatgcaattaattatcgctgcgccggaaaatatcagtccggaaaaaggcaccacctataaactagtacgtaaagttttccagaatcatgagcatgttcatgtggttggattacgcggtttcgccaatgatttaccggctatcgcgacaacacagacagaaataccgcaataacttcggaattaactgaggcgtaaataaatgaaaatggccgctaacagacggccattttttatagcttaaataaaatgagcttccattttatcgatgtgagaaatctgttagcgtaaagaatcgatttactttgtcgtataaataagtcaaatatcatttctgtttgtataataaaacttattagtaatggtcacgacaaactatgacgtacttagatgagcataccgggggcatagaatgtcgctagaaaagagaaattcactacggccattagccctatattgcgcacttatctgtagccagatacctatgttcagcgcttcagccactgcaccgactttgcccgtcgactctgcggctttgcccgtggagacaggaaccatgtcggtagcgcagagccgctctaaactgctggccgtgctgccaaaaaatatcacgccttattacgcttccaatctggcggagctatatgcgtctaaccagatgcggccgatgtggcaggatcgtctggcggtaaagagatttcagcagcaattagctgaactagcgatgtccggcattcagccgcagtttatgcaatgggtaaaatggttgagcgacccggaagtcaaaggaatggcgcgagatgtgattctgtcagacgcaatgttgggctacctgcactttgtgtcaggcgttggcgccaacggcagcgtttggctctatagcaacgtcccttacaaaatggccatgccgcctgccacgatactgaaccgttggcagcaagccatacgcgaaggcaatactgccgcctacctttcgactttggtaccacagcatccgcagtatgaaaagatgcatcaggcgctgaaaaccatgctggccgacaatcgtccttggccgcagtttaccggcgcggcgacgttgcgccctggtcagcttagcgatgatattcctgcgctgcgagaaatactggatcgcagtggcatgctaaacgccgctccagccgctccggttaagtcgccggaagtgattccgatggataatcctgcggtcgccgcagttaacgacgatttatccgtcgatgaagaaaaaactcgtgcgcaggctcattcgctggtagttagcccggcggcggccccgatctctgaaatggtcacttctccgcagactccggtagctaaacattccggcagtgcgctgagcgtgaccgacaatcaatacaccgaagatctggtcgcggcggtaaaacgcttccagcaatggcaaggtctaaccgatgatggcgtgattggtccgagaacccgcgaatggctcaacgtttctccgcaaatgcgagccagtctgctggcgttgaatattcagcggctgcgtattctcccggggcagatcgacacgggcatcatggtgaatatcccgaactattcgctgagttactaccagaatggtactgaagtattgtcgtcacgcgtgattgtcggccgacctagccgtaaaacgccgctgatgagtagcgcgctaaataatgtggtggtcaatccgccgtggaacgtgccaacctcactggtgcgtcaggatatcgtgccgaaagcgcgcaatgattccagttatttccagcgtcacggctatacggtgttatctggctggagcaatgatgcggaagttatcgttccttcaatgattgattggagcacgatctcgccgaataacttcccgtaccgcctgcgtcaggcgccaggagcgtctaactccctggggcgttataaattcaatatgccaagttctgatgccatttatctgcatgacacaccgaaccacggcctgttccagaaagatattcgggcattaagctccggctgtgtgcgcgtgaacaaggcctccgatctggccaatatgctgttgcaggatgcgggttggaacaatgcgcggatatcatccacgttaaaacaaggggataccacttacgtgaatattcgtcagcgtattccggtgcaactgtattatctgacggcgtgggttgcggacgatggtaaacctcaattccgcacagatatttacaattatgataaaacggtgagatcgggtgcacaaatcacaccacaagcagagcttttaatacaataaatgcagtaaaactcaataactaatggtctgaatacttggttgtctgacaggcgctcatttttgcgagcgcctaggaaccttcgcctcacgcgggttgactggttttccgcgggcggttatggttcggggcggtgcgttttgcgcttacttttgacattattgccgggtagaaacgatcatggataaaatcgacaatcatcgccgcaagtggctaaccttaggcgggacagcgctgggcctttcgctgttaccagggcacgcattcgcgaccctttctactccccgcccacggatcttgaccttaaataacctgaatacaggtgagtctatcaaagccgaattttttgacggcaaaggttacaataaagaagaattgagtcgcttaaatcatattttccgcgattatcgtgccaacaaagttaagcccattgacccacgcctgtttgatcaactctaccgcttacaaggtctgcttggtaccaccaagccggtacagcttatttctggctaccgttcgctaaataccaataatgaaatgcgtgaacatagccgaggcgtcgccaaacatagcttccacaccttgggtaaagcgatggatttccatatcgaaggtattcagctaagtaatatccgtaaagcggcattaaaaatgcgtgcaggtggtgtaggatattacccacgtagtaactttgtgcatattgataccgggccggcgcggacctggtgatcagcaatattcagccagtgggatagctttatcggttaggccactggagttggagccttatgaaatatcatattattccggtaacggcgttcagccaaaattgtactttgatttggtgtgatgcaacattgcaggctgctttggtcgatcccggtggcgacgccgaaaaaatcattgctgaagtgcgtcgtttgggcgtcacggtcacgcagatcctgttaactcacggccatttagatcacgttggcgcggcggcagaactggccgaattctatcaggtgcctatcatcgggccggaaaaagaagatcgtttttggttggaaggcttgccagcacagagccgtatgttcggtctgggggagtgtcagtcgtttgagccaacgcgttggttggaagaaggtgatgagataaatgtgggcgaaatgcggttatcggtgcttcattgtccggggcataccccggggcacattgtctttatcaacccgcaggcgaggttagccttaaccggcgatgtgattttcaaaggcggcgttggtcgtagtgatttcccacgcggcgatcatcagcagttgatcgactccatcaaacagaagctactgcctttgggtgatgatatggcgtttattcccggtcacggcccgatgtctacccttggccatgaacggcagagcaatccgtttattatcgacgaaccggccatttggtaaatggttctaccctgcagtagatgttctaaaggcgccgattggcgcctttttaaatgtgttttgatcgaataaggtaaacccgagtattttcctcaagaaacgataaataaatttgtgtaatatccgcagcgaacaatactaacagtagtatggtctcgaatgatgttgggctaacctcgaagattaatttattagccagctttaccgtagaggaaataaataacaatcattttttcttatagcagctttatagtcgtttcatggaatttactatgccatttcgtcgttccagtttaagaaagttgttgccccgattgggactatcctttttggtgttgctgctgtttatcctatttggtgctggcgttatttatgtgcagacagttaataatatgcactcagacgccgaaactaagttaaagcatgctcggcaaatgattgaccgtatttttgataatgctcatcttgccgcgactcgggtacagggcagcctagggcaaccttgcttacaggtagttcaaaatttacgcgatcaggtggctacaattcccgacgtccgctcggtaaatttaactcgacggggcaaccagatttattgcacttccctttatggcccttatgacgattacgtcaattcatcggcttacgttgatggtcagctatacctgatgtcgggaaataaagtgacgccttcacgaccggttgtgatataccgacaggtggccggggactacagcaccctggttggcattgatggttattacttacataatattcttaacctgctgagcggggatatacagctcagattgattatcggcgatcgttggatggatgccgcgggaaatacccatgcaggtaacccattgcataaaaacatgccgttgactcttgcttcggaaaaatatgcgtattccatctcaactaccctgactcatggccagtatctagcctatgcctggcaatatgccaccggcagcttaatatttttccctctgttaggttttatttccgcgtttctggtattccgtttgtgcggaaaatcctcttcgccgatgcagatactcaatcttgcgttggaaaacggggagttcgtgccttacctgcaaccggtagtgactgggaaaggggagcactgtatcggttgcgaagtgctaatgcgttggcataacccaactcatggcatgattcagccagaccgttttattcctctggcagaagatagcggattaattgtgccgatgacacgctctattatgcagcaggtcagcagtatgtttgctccttatgccagccagctaccggatgatttccattttggtttcaatatcagtgccgaccattgtcgtgatttaagtctggtagatgactgccgcgcatttattgccgcctttgcagaaaagcctatcaatattacgctggaactgaccgagcggaaattgattgttgccgatgaaattaccgatcgtttgttcgctgaactgcatgccttaggcgtatttattgccatagatgactttggtaccggccactctagtctggtgtatctgcaaaaattcaaagtagacttcctgaaaattgaccagagcttcgttggaatgatcggttctgatgcgttatccagcatcatcgtggagaatgtcatcgatctggcaacgaaaatggggttgatgacgatagcggaaggggtggaaaacgaaacgcaggcgcgttatctgcaagcgtgtaatgttgactatctacagggttatctatttggccggccaatgcctatggctgagtttatcgaaaaaaatatcaatcaggcgaccttcgaagaagcggcgtcggagctaaaacctaaaaagggtgcctaaggcaccctttaaccgcaatccactgaaaattgaatcagagtaccgcgacgatggcttcacacagtggagccatgttgtctggtgtcatgcctgccacgttaacacgacctgaattcaccgcatacacgccaaactcattacgcagacgcagcacctgttctttggtcaaaccactgaacgagaacatgccgttctggttaatgatgaaactgaagtcctgttttgcccctttctcttgcagggtattaacaaacagttggcgcatccgatggatacgttgacgcatatcggtcagctcttgttcccagatagcacgcagcgcgtcattactcagaatggtagcaacgactgaggcgccgtgagccggtgggttagagtagttagcgcggataaccgctttgacctggctgaaggatttctccgcgatatcgctgtctgccgcaacgatggtgcaggcgccgacgcgttcgttgtacaggccaaagtttttagagtaagagctgcaaacgatcagttctttatggctagcggcgaaaatacgcaggccctgagcgtcttcttccagaccacgagcaaaaccctgataggcgaagtcgaacagcggcagccagcctttagccacagacagttcggcaagtttagcccactgttcgtcggttggatcgataccggtcgggttatggcagcagccgtgaaacagcactatgtcaccggcttgggcttctgacaggcttttcagcaggccatcaaagtccagcgcgtggttggctgcgtcataataattatattcaaccacttccagaccggcagcggagaatacattcttatggtttggccagcttgggttactgacccaaacgcgtttagctgaagtttggtgagcaataaagtcggctgcgatacgcaatgcgccagtgccgcccggagtctgcgcagtgcgcgcacgtttttccgttacgattgggctttgtttaccgaacagcaatgcctgagtgcagctggcgaagaccggcaggccgtctatacccagatagttttttgttgtttcgttttccagcaaatactgttcagcttttttcacgctggtcagcaccggcgttttaccggtttcatctttataaacaccaatacccagattgattttatttgggcggtcatcggcgcggaaaatatcggtcagacccagaataggatcggcaggtgcagcagtgattttttcaaacatgtcagatgcttccatggcttagagttaagcggacagaatcatcagggtagcgccagttcagggctttgccaaccgtttgcgagaaaaagagatcaatcttgtgaggcggggtgattacgggtgaaaaatcgtcagaattactcaggaagtagcagattatgcacaatgtgagtcagggtttaaaagtaaaatacagaaagcaaaaggcagagccgaagccctgccttttttacttacaccaaccgagttggcattaagtcggacaacttagaactggtaaaccaagccaacacccactacgtcatcagtgttgatgccgttagcaacggtgaagtcatttttgtccagcatgttgattttgtaatcaacgtaggtagacatgtttttgttgaagtagaagtaagtagcaacagaagcatatttcaacaggtcttggtcattaccgtaaacgctgttcagatccttacctttagactggacgtaggccagggaaggacgcagaccgaaatcgaactggtattgcgcaacgatttcgatgttctgagttttgttagcgatagtgttgctagctgaaccgtatggcgtggtgttcagcgtttcagcatacattgcagccaggtatacgttgtttgcgtcgtatttagcacctacgttccatgactgagctttgtcgccttcagcagtggtgaagcgtttctgggtatcagtacgattagaagaagcataagctgcaccgaagcttacgccgtaaccgatatcataggtagaagagataccgaagccgtcaccgttttcaactttaacgtcgttacggccttcttcgtttttgccttggtattgcagagcgaagttcaggccatcaaccagaccgaagaagtcattgttacggtaagtcgccagaccggtagaacgggcattcatgaagttgtcagtcttagcgatagagtcgccgccgaatactggcagcacatcggtcgctgagctcacgtcatagagtacgccgtagttacgaccgtagtcgaatgaaccgtagtcaccaactttcagaccagcaaagcccagacgggttttgttgcctttgtcgccctgagattcggcgtggttagcctgaatgttgtattcccactggccgaaaccggtcagttggtcagtaatttgggtttcgcctttgaagccgagacgaacgtaagtttcgtcgccatcttcgcctgcgttatcggagaactgatggcgggcatcaactttaccgtacagatccagtttattgccgtctttattgtagatttctgccgcatttgctgcaccagcagccaacagagcagggattactactgcaagaatattgcgcttcatcattattattaccctcattggtgttattcggacacctgccactgccgccaataatttttttggaactattgttgagagtttggtgtcgtctgtgtctgagacgcagtgttccattcacagaccggttaatccacaccgaaaatgctactaattgacaaaaactgtttcattaaaagacaaagtgttactaaatgtaaaataaagggaactttgtgactaatatcaaactttaaaaaatgacaaaagccagcataagctggcttttttttagacaactaacagaaatcaattggaaatgattaatttagaagctggcgtttctgggggtacgtgggaacgggatcacgtcacggacgttttgtacgccggtcacataggcgatcaaacgctcaaatccaagaccaaaaccagaatgtggcacggtgccgtagcgacgaagatcacgataccaccagtaatcttctttattcaggcccatttcttgcaaacgttggtccagaacatccagacgttcttcacgctgtgaacccccgatgatttccccaatacccggcgctaatacgtccatcgcggctacggttttaccatcttcgttcatacgcatatagaaagctttgatgtctttcgggtagtttttaaccactaccggcgctttgaagtgtttctcagccagatagcgttcgtgctcggatgacagatcgataccccacgacacttcgttttcgaaggtctggccagatgcgagcaggatttcaattgcgtcggtgtaatctacctgcgcaaagtcggagcttacgaaacgttgcagacgatcgatcgcatctttatctacacgctgagcaaagaaggccaaatcgtcagctcgctcgtccagaacggcctggaagacgtacttaagcattttttcagccagagctgcaacatcatctaaagaggcgaaagcgacttccggctcaatcatccagaattcagccaggtggcggctggtgttggagttttccgcgcggaaagtcgggccgaaggtgtaaaccttggataacgcacaggcgtaggtttcaccgtttagctgacccgatacggtcaggaaggcttctttaccgaagaaatcttcgctgaaatcgattttgccttcgtcagtacgcggcaggttttccagatccaaagtcgatacgcggaacatttcgcctgcgccttcggtatcggatgcggtaatcagcggagtagaaacccagaaataaccgttttcatggaagaaacggtgaatcgcctgcgccaaagtgtggcgaacgcgcgcaacggcaccaatcaggttggtacgtgggcgtaagtgagcgacttcgcgcaggtattcgatgctgtggcgcttggccgccatcggataggtatccggatcgtccacccagccgacaaccttcacgctggtcgcctgaatttcgaaactctggccttcacccggagaggcaacgacggtgccggtcacttcaaccgagcaaccggtggtcagatgcagcacttcgtcctgataattcggcagagtattattaacgacggcctgtaacggatcaaagcaggaaccgtcataaacggcgacgaaggagatgccagctttagaatctctccgggtacgcacccaaccgcgtacggtgacttcactgtcaaccgcagcacggccttgcagtacgtcgactacaggcactacgctcatagatttctctctttataagttttggttcagaaataaattaaaacccaaaatatggggatgttgctatgttacttgcggcagtgcaggacacaagaggaaatcatcggattagtgcaagatttctgcggttaagataaataaatcggcggatggcgaagatcgtggctctgtatctgatgctatataaaggagggagagtgaaataggccggatgagggagactcacccggcaccctgcggttagctagccttttgtactaaaggcaaatcaaaggcttcacgcagttcatcaacgaaggctggatcctggcaaatggtttttccagggctgtctgacaatttggccacgggctttccattgcattccaccagcttaatcacgatatttagcggtttgacacccggaatatcacaggtcaggcgggtgccaataccaaagaccagattgatccgctgatagaaatggcgatataaatacagcgccttctccagatcaagattatcggaaaacaccagcgttttgctcattgggtcaattcccagcttgataaagtgagcaatggctttttcaccccattctaccggatccccggagtcatggcgtaaaccctgatagcgagaggcaaaaggcagatcgaaatcgcgcaggaaagcatccatggtaatgcaatcggttagagcaatccccagttgatccggatattcatccagccaggcttgtaaggcaacgcgctgactgctcgccagctcggggctgatttgctgatgagcctggaaccattcgtgtgcttgagtgcccaccggcgtcagagataatcggcgagccagatcgtaattgctggtgccaaccaaataaggaaactctgcttgtaaggtgctgacaaccgcctgctgcacttcaccggagaaacggcgacgggtgccgaaatccatcaatttgaaacgggagatatccacatcaccgcttaattgattgaattgtaacagcttggcgcggagtttctcgatagccatctgcgggacgatctgcggcgagcggtggcgatgcaccacttcgctgataaccgccagcaatggtacttcccacataataacttcacaccacagaccggaaattcgaatatccagtttcccctcgcgggcggatacggtgacctgctgcgggttgaaccgaaaatctcgtaaccaattcagataatcggatttgaagaaggggaggccggacagataggcgaattcgtccttggttaacgccagttcactcataagagcgatctgacgacgaatttcatccacatagtcgcccagcaattcgtcaccgcggcagcggaattccgcagcaacggtaatatggcgataacgatgaaacactgcttgttgcatatgaagcttgtaagcatccgtatcaagcaatgaagtcaaaatcggagaggcgtcttgagtcatggcgcgttacagcatcctcgtaggagcattttccagattcggcataatcaataaagttgcaggagtataccggtattatcctgtgattgaaccctcataacaccataaatggcgtaacaagatctagagttaaacgtgccatcaactttactcgtcggccttttagtctatggaaaataaaataagctaaatattttcgtgacttagatgcaggggttatttattggtcacccgaaatgtagggttattatttgtcattttttattcttaacagaaacaaaatacctggttgatttatcgtcagaaactgcgctattcagataaattttattacagttatttttataaggaattaattgtgtgggaaaaccacaataaaaacggcgtggttgttctgttattaggctaaataaaaccgtttgcggtataaaaactgacccgatctttgccattgcctttgcaataatacaaggcttcatccgcttgcttaatagcccttttcatttctgagtagttgtttagcatggcaatgccgcagctgatacggaacataaccgtggtgccatcttctaatttcagcgtcagttgtttcacttttaaccgtaggttattcatgattcgaattgcgtcctccggcgtacagttacttaatacaatggcgaactcttctccgccgtagcgtgaaaagatatcggtggagcggaaatgggatatcaggagcttactgaattcaatcagcaccttatcacctacatcatggccgtaggtgtcattaagtgacttgaagttatcgatatcgatcaaagcgaaagccatcggataactagcggcaggcatggcttcacacaggttaaacagttttcgacgattataaatattggtcagcggatcaataaaggacgctttttccagctcaccaatcaggttttgtttttcagattcaagaaggactttatctaactgataacggcgcagatctttaattgcgtcggtaatagcaataagatcctgactcagataaaccccctgattctcaatattcatatttccctgagagagctttttgatattcgttgtagtttcagataaccatttattgatattaacgcaaaatatcaggcatgggacgataataaatagagctaataacattccgatggaaagggtactctctactcttatgttactttttaggatgttacttttgagtgattttatttctttttcaaatacttggctattaaatctttgggaaattgagtcaatataatttacatactcataaatatctctgacattgtacttttcgtttttggtcatagagagatataaatcattggcgattttttcgctgttttgcagcgatatcttgccttgtaaatcgttgactacgtgactcatctgattgagtctgtatgttttttcgataaaaccgaaacgaggttgcagcgagtagagcacgccggtaagttggatcgctttaagatagggctctggtcgctgaactttggctaaattgatatcaacgatctgatcgactaaatcggtaagggtcataaccaaacggctatttattctgatggcttctaggaagatatatgattcagattttatcagacggttgtcgatagtataaagcgagtatttctgtttgacctcagagatataaaatgcattattcaggtcatagagataactattgaccaaaggcattcctgaacttgcacgcaaatcattggctattaatttatccatcagttgaaccgaagaaattaccaggtatttataagtggctcccagtttttcaaccataattgaattggcattttttttaaatatcgctattttcttagtggcagttattactgcctgattgatttcttcctggtttatatcggttttgattaaactgattttttttaagcgatgcatgtgcaatacggcctgaaatgcctcggtaaattcttgtaatcgctcaattttatacaggtttaatttattgttttctgcgatggcgctattgcgagatatgttggtgtaaacgaatacagagaaaaatagcattaatgaaagtgtgaaaaaataaataagatattttactctcatagccgtattgttcccgatcagccttcgttgtgcattacaccacttactccgtcatatccattcgaatcagcttgttggtgatgagctattgcgtgaatgataccactctgagattaaacttaacgagagatatttctgatactgtcagtcgtatttttacactctatttctattctagttcattttgtccacataccttggagccgacacatattccgcaacaaaaaacaccaacggcaacgagtgttatgctgagtaatagccagacaataaaataaacagagtatttggttttcaattacctgacggctatcaccttgaccagttggggtcatcgtagttatccctgcgatacctgttgttcatagaaatccttcaggttctcaactgggttttttttacagctgtgatacatttaaattcactctgagtctggatggaaagtctctgtagtacagagattccgccatctgagtacaaaaacaccagaccgggtaatcatattcactgatgacgtcaaaagggtttttatgacacaacagccgcaagccaaataccgtcacgattatcgtgcgccggattacaccattaccgatattgatttaaatttcgagttggacgcgcagaaaacgacggtaacggcagtcagtaaagtaaaacgtcagggaaccgcaggtgccccactgatcttgaatggcgaagacctgacgttattaagcgtcagtgtagatggtcagccgtggcctcactaccgtctacaggacaaaactctggttatcgaagaattaccggagcagtttactttaaccatcgttaatgacattcacccggcgaccaatacggctcttgaagggctttatctttccggcgaagcgctgtgcactcaatgtgaagccgaaggtttccgccatattacttattatctggatcgtccagatgtattagcgcgttttaccacgactattgtggcagataaagctcgctatccttatctgttatccaatggcaatcgtctggaacagggcgaattggctgatggccgtcattgggttaaatgggaagatccgttcccgaaaccaagctatttgtttgctctggtggcaggtgattttgatgtattaagagacacctttattacccgttcaggtcgggaagtggcgttagaattgttcgtcgatcgcggcaatttggatcgcgccgattgggctatgatttccctgaaaaattccatgaaatgggacgaaactcgtttcggtctggaatacgatctcgatatttatatgatcgttgccgttgatttcttcaatatgggcgcgatggagaataaagggctaaatgtcttcaactccaaatacgttctggctaaagcagaaacggctactgataaagattatcttaatatcgaagcggttattggccacgaatatttccataactggaccggcaaccgcgtgacttgtcgcgactggttccagctcagcttgaaagaagggctgacggttttccgcgatcaggaattcagctccgatttgggttctcgtccagtaaaccgtattgataatgttcgtgtgatgcgagccgcgcagtttgcggaagatgccagcccaatggctcatgctattcgtccggataaagttatcgagatgaataacttctataccctgacggtgtatgagaaaggatcggaagtgatccgcatgatgcatacattattaggcgaagctcagttccaggccggaatgcagctgtatttcgagcgccatgacggcagtgctgccacctgtgatgattttgtgcaggcgatggaggatgcgtccaatgtcgatctttcgctattccgtcgctggtatagccaatccggtacgccgttagtaacggtacgcgatgactatgatgcggaaaaacatcaatatcacctgcatattagtcagaaaaccttgccgactgccgatcaggccgagaagttacctctacatattccgttcgatattgagctttacgatagcaaaggcgaagtcattccacttcagcgaaacggtttgccggttcatcatgtgctgaatgtgaccaaatccgaagaaacctttacctttgatcaagtgccttgcaagccaacgccttcgctgctgcgggagttctctgcgccagtgaaactggattatccgtatagcgatcaacagttaactttcctgatgcagcgtgcgcgcaatgagttttctcgttgggatgcggcgcagaccttgctagcgacctatttcaagctgaacgtagcgaaatatcagcaaaaacaaccgctttccttgcctctacatgtggcagatgccttccgcgcggtattgttggatgagcagctggatccggcgttagctgcgcaaattctgactttgccttcagagaacgaaattgccgagttgttgacgactattgacccagaagcgatcggggcggttcacgaagcgattactcgttgtctggcgcaagaattagccgacgaactattggcagtatatctggctaatcagacgccggaatatcgggttgagcatgcagatattgctaaacgtgcgttgaaaaatacctgtctggcttatttagcgtttgctgacgccgagtttgctaacaagctggtttctgcccaatatcatcaggctgataatatgactgattcgctggcagcgctgtctgcggcggttgcggcgcagttgccgtgccgtgatgagctgttggaagccttcgatgtacactggaatcacgatggtttggtgatggataaatggtttgccttgcaggcatccagcccagccgatgacgttctggaacgggttcgcgcgttgctgaagcatccgtcctttagcctgagcaacccgaaccgcacccgcgcgctgatcggggcgtttgcttcagctaatccggcggcattccacgctaaagacggcagcggttatcagttcctggttgagatcttaagcgatctgaacactcgtaaccctcaagtcgcctcacgtttaatcgagccattaattcgattaaaacgttatgacgccgaacgtcaggccaagatgcgtcaggcgttggaacagctcaaaggactggaaaatctgtctggcgatttattcgaaaaaatcaccaaggcgctggcagcgtaatgcgataatcagcgattgacgggagttaaactcccgtcaaagcaaggatgtttatttcttgaacctgatgatgaattttgccgattctacagtgatactacctacttatttcatacaccgtttttatttacagcgctgagttgatcttgtttttcttgcctgtgctcaatttaatttaaagatagaatatattactactcatttgaaatgccgaaacgtgtttaagtttctgttattctgatgcggaatagtggccatatttttaaataatggaattgaattaaccttcataatagacttaaatatggcaaataatattttcttgacgataaatggaactgcgcaggggttaatatcttcaggttgtttgacgcaagactccatagaacataagcaaccaaattggtcatgaaaatgagatatttgtttactagttttcgcatagcataaaatgaattatttcatcttaagtttgatttctaacgcacatcgccaaacggcgctcaagaaaagtaggctagcatagagtggagggatgcgatactaacaggcctaaacgttaattatccgaatagcttgagtcatgggcatcgcagccagaagagcttacatccgttcaatattaagatattatttgcgaatatcatgcggctggcatatcaggtcatggcttatggtaaaataaaaaccactgatttataacgtattttctcaataggaaaatgcataaacgccaatgccgagaaatgccaggttttctcaaggtcagtgtacccattctgttaagtctttagcgtttttgacaaatatcattggcctgtttggtctcgatttccaatatgtcccatacccttgagtagacaaagttgtggtgaggtgaaaatgaaaaatagtcacgagtgcaagaagaaatatcgtcatgtaggccaataaaagcatatgttttaaattctatgacgttactctttcctgtcatcaatatatatgcagatattatcataatacatataagtgaatccgcaaccatatagttggcaaggcgatataacgacgcgaaaacggggtgtgacagatacgggaatatttctttatttaaaacatagagaatcatccataaacctaatagagcaattcctaacagaacaatgaaagaaaaaaaagactcactttatctgtaatggattattttctacttatactgtttttcatattcttttattcagcagtatttccgctataggtaacagcttggcgaatctaatctatcaccagcttcgctagcatgattacctctaaatcgtcagcttaggtggcattgaatcgacattaccctgaagagagacattgtttttaggcatgaaaggaacccttggcgcggttggttttactcattcctgaccaataaatacacccgacattaacaagtgatgatcaaaataagcctccggtagcattcttttcagggctttacttagcaaacgtttactttgtgaaaggatatatttaccattcgtgcgtttatccactcggtggagagttcgtcccgcttgccgctggcgaacgttgccgatagaaaacgttatcgatagaagaataggctgaagaactcgcgttttcattccattttcctcagtcacttgcttgtcaccgggagcataggagatcacatgttttatccgatcgttaaaaaggcactgttccagttcaatccagagcgcgctcatgaactcactttccgtcaattaaaacgtattacgggtacgccgctggagtttttagtgcgtcaatcggtgccgacgaagccagtgagctgtatgggactgtcatttaaaaacccagtaggtttagcggcgggtctggataaaaacggtgattgcattgatgccttgggcgcaatgggatttggctttattgaagtggggacggtaacgccgctgccgcagccgggaaatgataaaccgcgcttattccgcgtccttgaagctgaaggcctgatcaataggatgggctttaataaccttggtgtggataatctggtcgataacgttaaaaaatcacattttggcggaattcttgggattaatatcggtaagaataaaggtacgccggtagagaatggtaaagatgattatctgatctgcatggataaagtttatccgtacgccggttatattgcgattaatatttcgtcaccaaatactccagggctacgttcattacagtatggggaagcgctggacgatctgctggcggccgttaaaaataagcaggcggaactgcatcagcgtcatcataaatatgtgccagtcgccgttaagatcgctccggatcttactgaagaagaattgatccaggttgcggatagtctggtaaaacataatatagatggcgttattgctactaataccactttagatcgttctttgatccaaggtttaaattattgtgaacaaagtggtggattaagtggccgcccattgcaatctcgcagcaccgaagtgattcgccgtttgtcgcaggaattgcagggacgtttgcctattattggcgtgggcggaattgattctctgatggcagccagagaaaaaatggcagcaggggcttcactggtccaaatttattccggctttatcttccgtgggccgggtttgattaaagatattgttactcatatctaattatttctcttgattttcgtctgggggtttatttattcccccagctcgtctatattttatccgttagtttaaataaacatcgataaatgtaaatgaattgagtttgattagataaccggacaactcaattattgagcggtaaatgttggcagtgggatgggaaggaataaaatatgcggattaaacctgacgataaatggcgttggtattttgatgctgaacacgatcggctgatgctggatttagccaatggtatgatatttcgttctcgcttccctgctaaaatgttaacgccagatgcatttagtgaatccgcattttgtgtggacgatgctgctctttattttgaattcgaagatcaatgtcgccaaattaaattgagccacgaacatcgtgccgaactggtattaaatgcgctggtggcattccgtttcctgaaacctttaatgccgaaaagttggtattttgtgcaacaggcaaaagttttaacgccagaaaatggcagcctggcgttagtgaaactgatggaaaccggggaagaggttagagtattagtggttgagtccggtgattccgctagcttatgtttattggctcagcctcaattacagctggcgggcagaaccttgatactaggcgatgcgattaaaattatgaacgatcgtttattgccattagtgatagaaaataccgatattcaggcgtttgaccgggcggtctgattgataatgactgcttgataagattaatgccatccgcccaatttcggtttgttctttcgaggctatttccccgtcagtgagatatcaccttttggcacacagctgcacgccagaataacgccattttctgcaatagcactttgttttaacggtgccacttcaccctgcaacaatgtcactttgcagctaccgcatattccagcccgacatgaataaggaatgcgaatactttgctgttccagttgctccagtaatacctgctgattattaccagtaaaacgaataccgttatattcaatagtgacggcgcgagtactatcctgcaccatcggtaaagcctccgccacgacgccagcgccataagggcggggcggtttggtcgccagaacttcaatattatcgccgacgcgaataatgccgctattacgtgcaatcatattctgaccaaaatccacatcgccattatctgcagttcggaatttctgtagtgtagttaaaggttcggcggtaggatgcttttttccacgctcaacgctgacggtggtcaaaatacagcggctgcatggtttcaccagatcgaaaatcacatcgccgacgcgaatcacctgccagctatcttccgcaaaagcgctggcgccggtgacgactaaattcggccgaaactgttcaatcttaatgctgccggggcatcgttgctgtaattcggcaaaagaggcttcattaatcagcaaatagggatagccatcggcgaaggaaagcggaatttctggctggcgtttcacccgacgagtcagttccggcccaagccagcgtaattgaacttcgcgttggaaatagccgctgagccagtcatttatttccgcaggggcaatcagagcggtaaaatgatttccccatacttcggtgggtgccgcagtgggggaaaaatcattaaagcggatactggcgctttcgccgtctggcgcggtaagaaataaaccgtcaaccagcagcgccggagtaaaagtcaccatcttcggattattacgagctgtaataaaagtgccatccggttcggtgatcatgaatacccggtcaaaagccaggccgctactgccgacctgagcatgggaaagctgtaatccacgcatggattttaccgggtgaatgtaaagtttagagagtgtgatcaccatgtgctccatgcgtgtatgaaattagaagggagcaactttatgacaagcggacaggattagctataatgcgcaacaattttatttttggtgatagtgcgatatgaactctttgtttgccagcacggcgcgtggactggaagaactgttaaaaagcgaactcgaagcgctgggtgcccacgactgtaaaatagtgcagggtggggtacattttcagggtgacgatcggcttatgtaccaaagtttgctgtggagtcgtttggcttctcgcattctgctgcccctgaatgaatttaaggttcacagcgatctggatctttatctgggtgtgcaagctatcgactggccgtcgatctttggcgtggacaaaacttttgccgtgcattttagcggcgtgaatgaagaaatccgcaatagtcagtacggcgcattgaaagtaaaagatgcgattgtggatagcttcactcgcaagatcgatcaacgcccaacggttgccaagcaacagccggatattcgggtgaatgtgttcctgcaacgtgacaccgccagcgtggcgttggatttgagcggcgaaggcctgcatcagcgcggttatcgcgatctgaccgggcaggcaccgttaaaggaaaacttggccgcagcgattattctgcgctctggctggcaggcaggaacgccaatggtcgaccctatgtgtggttccggcactttgctgatcgaagcggcgatgatggcttcggatcgtgctccgggactgcatcgccaccattggggctttactgcctggaatagttttaacgaagagttgtggcgcgaactgacggcggaagcacaggtgcgtgctcgccgtggcctacaggaaaccacgtcccgcttctttggctccgatatcgatcgtcgggttattgaaatggcgcgtgccaacgcccgccgcgccggtgtagcggaattgattacgctgaatgccaatgacgtcagcaaactggttaacccgctgccggaaggtcctgtagggacggtgatcagtaacccgccgtacggggagcgtttggaaagtgagccagcgctgatcgccttgcacaatatgttcggccgtatcatgaagacggcgtttggcggctggcgtttatcgctgttcagcgcctctccagaactgttgagctgcttgcaattgcgtgccgagcgtgaatttaaagcgaaaaacggcccgctggactgtgtacagaaaaactatcagctggcggctaacccgcagggcgccagcggcgttcaggtggcagaagattatgccaaccgtctgcgcaagaatgtgaaaaagctggataaatgggcgaaacagcagggtatcgaatgttaccgtctgtatgacgcagatttgccggattacaacgtggcggtagatcgctacggcagtaaagtggtggtacaggaatatgcgccgcccaaaactgtcgatccgcaaaaagcccgtcagcgcctgttcgacgtgatcaatgccactctggcggtgctgaatttaccgtctaaccaattggtattgaaaacccgcgaacgtcagaaagggaaaagccagtacgagaaactggcgcagaaaggcgagttcctgctggtggaagagtataacgccaagctatgggtgaacctgactgactatctggacaccggtttgttcctcgatcaccgtctggcgcgccagatgctgggcaaaatgagccaaggtaaagatttcctgaatctgtttgcctataccggtaccgccagcgtgcatgccggcttaggtggcgcgcgcagtacgactacggtcgatatgtcccgtacctatctggaatgggcggagaaaaacctgcgggttaacggtttaaccggccagcaacatcgattgattcaggcagattgcctgtcttggttaagtaataccgacgagcagtttgacgtgatttttatcgatccgccaaccttctcaaactccaagcgtatggagaccacgtttgacgtacagcgcgatcatctggtgctgatgaaagaacttaaacggttactgcgtcgtaagggaaccattatgttctcgaacaataagcgtggtttccagatggatttggccgggattgaagccctggggctggtggcaaaagaaatcaccgctcaaacgcaatccgaagactttgcccgtaatcgtcagatccacaactgttggctggtaacccatgccaacgaggaaaagtagaaactatgtcgttaattagcatgtcaggtgcctggctgtcgttcagtgatgcacctttgttagacaataccgaattacatattgaaccgaacgaacgcgtctgtttggtcggtcgtaatggcgcgggtaaatccacactgttgaaaatcctgagcaaggaaattgcactggacgacgggcgcattgtgtacgaacaagatctgatcgtggcgcgtctgcaacaggatccgccgcgtaatgtggctggcaccgtgtttgacttcgttgcggaaggggtgcaggagcaggcggagcatttgaaagcctaccatgccactttgcatcaggttgagctggatccaagcgagaaaaatctgaatcgtttggcggcgttacaggaaattcttgatcatcagggcctgtggcagttagatagccgtattcatgaagtgctggaacagttgggtctgaacgctgacgccgagctgtcctccctttccggcggctggctgcgtaaagcggcgctgggtcgagcgttggttagttcgccaaaagtattgttgctagatgagccaaccaaccacttggatatcgaaacgatctactggctggaaggtttcctgaaagagtttcagggtagcatcatctttatttcccatgaccgttcatttatccgtgcgatggcaacccgtattgtggatctggatcgcggtaaactggtgtcctggccgggtaactacgagctgtatctggcgagcaaagaagaggcgctgcgggttgaagaactgcaaaatgctgaattcgatcgcaaactggctcaggaagaagtgtggatccgtcaggggattaaagcgcgccgtactcgtaacgaaggccgcgtgcgtgccttgaaagcgttgcgccaggagcgttctgagcgtcgtgaagtgatgggcaccgccaagatgcaggtggaagaaaccgtgcgttcgggcaagattgtcttcgatctggaaaatgtcaattatcaggttggcgataaagtgttggtgaaaaacttcaccgcgcaggtacaacgcggcgataaaatcgccctggttgggccgaacggctgtgggaaaaccactttgctgaagctgatgctcggccagttacaggccgatagcggtaaggttcactgcggtaccaagctggaagtggcttacttcgaccagcaccgcgctgaattggatccagagcgcaccgtgatggataacctggcggaaggtaaacaggaagtgatggttaatggccgttcacgtcacgttctgggctatttgcaggacttcttgttccatccaaagcgggcaatgacgccggtgaaagccttgtccggtggagagcgtaaccgcctgttattggctaaactattcctgaaacctagcaacctgttgattctcgatgagccaaccaacgacttggacgtcgaaacgttggaattgcttgaagagatggtggatggctatcagggcaccgtattgttagtcagccatgatcgtcagttcgtcgataactctgtgaccgagtgctggattttcgaaggcaacggcgaaatcagcagctttgtgggcggttattacgatgctcataaacagcgcgctgaagccaagccgattcgccaggctgcgccgaaggtagaaacgcctaaagccgctgccccggaaaagaatacagcgtcggctaagcgttcgacaggtaaactcagttataacttgcagcgtgaactggatcagttgccgcagcagcttgagaaactggaagatgaaattagcgcattacaagctcaggtgagcgatgccaatttcttctcccgtcctcatgaggaaacccagcaggtgctaaaagcgctggccgccgcagaacaaacgttggaagtggcttttgctcgttgggaagaattggaagcacagaaaaacggctaattaaagcgggggagcgtagggctattgctgcactccactgacttaacggctgccataccgttctgttgccaatgcgtaaaacgaattgtgtagcagaacggtattttttggcgctgaaatattgccgtgaaggagagttctattgtgttctgttagccatcacgatcacggccatcatcatgttgaaagtaatgacgcgatgctgtgcccgcagtgcgatatgctggtggcattgccgaagttatcttatggcaccaaagccgtttgcccgcgctgtaaaacaacactgagtatgcggtgggaagaaccgcgtaaacggcctataggctatgcgctcagtgcgttatttatgctattggttgctaacctgttccccttcgttaatatgcgggtggcagggattaccagtgaaattacgctgattcaaattcctcgcgttatgctgaacgataattacgccagcatggcgacgctgttcatggtgctggtgcagttaatccccgcattttgcatgatggcgattatcctactctgttcaggtactcgcctaccgaaacacctgaaaaccgtgatggccaaagcgctgtttatgttcaaaacctggtgtatggtggaaattttccttgccggtgttttggttagcttcgttaagctgatggcctacggagatatcggtatcggcagcagttttgtgccttactgcctgttttgcctgctacaggtgcgagcttttcaatgtgtggatcgccgctggctgtggcaggatatcgaaccggctccggcgataaactgcgagctgacctttggccgcacggggatccgtcagggcgtgcgttcttgctcttgctgcaccgcgattttgccggtcaatcaacgagaatgtccgcgttgccacacccgcggctacgcccgtcgccgccatagcctgcaatggacgatggcgctgctgataacctctatcctgctgtatattccggcaaatctgatgccaatcatgatcaccgaagcgctcggtaatgaaatgacttcgaccattatggccggtgtgattttgctatggggagaaggttcctatccggtggcaatggtgatctttatcgccagtattatggtgccttcgctgaaaatgctggccatcggctggttgtgctgggacgcgaaagggaagggcaaaactgatagcgaacggatgcattttatttacgaagtggtcgagtttgttggccgctggtcaatgatcgatgtttttgttattgcagtgctttcggcgttagtccgcataggccagctcatgagtatttatccggctataggcgcattactattcgcaatggtggtgattttaaccatgctggcagcattgacctttgatcctcggttaacctgggatcggatgagtgaaacaaccaagaaggagccgcaaggtgacggacagtaacccaagccatggtgtggcagagatagaaaaaatcaaacgctggtctccggtgtggatcattccgatagtgaccgccctgatcggcgcgtggatattgttttaccactttagccatcaagggcctgaggtgactttatatacgcaaaatgccgaaggcatcgaagcgggtaaaaccaaaatcaaaagtcgcagtgtcgatgtcggcacggtagaaatggtgactttgagtaacgatctcaatcaggtcatcatcaaagcgcgtttgaattcaggcatggagaagttactgcgtaccgattcagcgttttgggtggttaagccgcaaattggccgggaaggcgtgtcaggtctgggtactttattatctggtgcctatatcgagctacagccgggccgcacggataaaagccatgatgagttccatctgcttgattcaccgccgttagcttctccggatgccaaggggttgcgtatcgtgttggatagcgatcaggcagggcaattgaacgccggcgatccggtgctgttccgtggttatcgcgtgggttcggtagaaaccggttctttcgacccaacgtctcgcttaatgcaatatcagctatttatcagcgcaccttatgacagtctggtgacttccaacgtccgcttctggaaagatagcggcgtggcggtggatttatcctcgcagggaatgcgggtggaaatggcctcgctggcgaccttattcagcggcggcgtcagtttcgatgtgccggagggggtcgctttaggtaagcctgttactcaggataaaactcagtttaaactgtttgataatcgcagcagtattcagaattccttgtttaccgaacatgatgatttcctgctgttcttctctgactctgtgcgcggtttgcaggctggcgcgccggttgaattccgtggtattcgcgtcggtaccgtaggcgatgtgccgttctatgccgaaggcgtgaaacagcgcctggataacgatttccgtattccggtattaattcgcatcgaaccgggccgtttccgtaacgatctggggccggatgccaactttgagcaaattctaaaaaccgccaaagagcgtggtttacgcgcatcactgaagtctggcaatttgttgaccggcgctttgttcgtcgatttagacttctatccggatgctaaaccgtggaaagggccgcaggacatagcgggttattctctgataccaacggtgagcggcgggctagcgcagattcagcaaaaagtcatgatgacgctggataagatcaataatctgccgttaacgccgatgttgcatgaagtcacgcagacactggccgaaagccagagaaccatgcgtgaaacccagaaaacgttggcgtcgctgaacgagatcacctcaagtcaggcgatgaaagatctgccgcaagatcttcagaaaacgttaaccgagctgaatcgcagcatgaaaggcttccagccgggttcacctgcctacaataaaatggtcggcgatatgcaacgtttggatcaggtattacgcgaactgcaaccggtactgcgtaccctgaatgaaaagagtaacgcgctggtatttgaagccgccggcagccaagaccctcagcctaagaaggccaaaaaatgatgaaatggatgatggtatttatggcgctggtactcagcgcctgtagcagcagcacgtctaaaacctactaccagttacctgcgttaggtacgccggttgccgtcagcagcgacacacaaggtgtgactcggcaactgtggctggaacatgtcagcgtcgcggattatctggccgcgtccggcgtggtttatcagacgaatgatgtgcagtatgtcattgctaataacaatctgtgggccagcccgttggatcagcaattacagcaaacgctggttaccaacctgagcagcgcattgccgggctggctggtttcagctcagccactggacagcgatcaggcggtgttaaatgtcacggtgaccggtttccatggccgttttgacggtaaggcaatagtcaaaggggtttgggtggtgaaatatcagggcaagctgattaagcagccatttgatctggaagtgaagcagagcgaagatggctatgacgcgctgattcgtacgttggcacaaggctggcaacaggaagctcagaacatcgctactcagttgcaacgtattcagtaatattttgtactaattcagtctaagccccttttccttctcattattctgatgacatggcaaggggctttttatttaaaatcataatgttatctctcccctttaaatcaatcacttagtcaattaaacgggcgtagctcacaaatgtgacattggcgtgaatattgcgcattgattttccctgtcaaaaggactatttcttaatcgtggttgtacataaaacagccactgttttctttccagcagacaagaaatgagggataagaggcatgaagagacagaaaagagatcgtctggaacgggcattatcaagaggatatcaggcaggtatttcagggcgttcaagggaaatttgtccctaccaatcgttagacgcccggtctcattggctaggagggtggcgacaagccatggctgacagggctgtgaccgcttaagcggctccctgtgattcgaggataacctccgctttaggcggaggttttcatttcagagacaagactactcagcatagtcttgcttatcgcgacaaaaaactagccctgccaacgtttcagcaaaatactggcgttaaccccgccaaaaccaaaaccgttagaaagcgcataagtcatctggtgagggcgagctttgtcgctgacaatatccaatccggcactggcaggatctggatgggtcagattcaaggtggcgggaacgatttggtctcgcaatgccagtacggtaaataccgtttccaggccacccgcgcctccgagtaagtggccggttgctgatttagtggaggtgacggctagctgactgtttgtgccaaacaggtgcttgatcgcgttgatttcccccagatcgcctaccggcgttgaggttgcatgagcatttaagtgctgaacctgatcgggagtcacacccgcctgccgtaatgcgattttcatcgctttgtaagcgccgtcaccgtcttccgccccggaagtcatatggtaggcatcagcgctggtaccatagcccacaatctccgccagcggcgttgcgccacgagccagagcgtgctctaactcttccaccactagcaggccagcaccttctcccattacaaaaccatcacgagcgctatcgaacggccgtgatgcctgttccgggtgttcgttaaaaccatgagaaagggcgcgagccgccgcaaaaccggccaggctgactttatcaatggccgcttcggcaccgccgcacagtgcgacgtcggcctcgtggttgcgaatcatacgtaccgcatcgccaatggcctgaacacctgcggcacaggcggtaaccggcgcgccgattggccctttgaaatggtgtttaatggaaacgtggccagcggccagattgaccagaaacgacggaatggtgaaaggagacagccgtttggggccgcgactgtcggtggtgcgaaccgcatgcgcaatcgcggggaatccgccaatacctgaaccaatcacggtcgcggtgcgctcttgttgatcttcggcgattgcctgccagcctgaatgggcaatggcttcatcggctgcagccatggcaaactcgataaaacggtccattttcttttgatctttcggtaaaacggcgcggtcgggatcgaaaccgccttctggatctgctgccagcgtaggaacctgtccaccgactttggttgccagctctcccacgatctcatccggcaaccggcggatacctgattgcccggctagcaagcgctgccagacgatttcgagacctgttcccaatgggcaaatcacgcccataccggtaatcaccacgcgacgcatactcatacaatttccttattcggattcaatggaacgggcagacgccttttcttgcatcaatgcaaggcgtcgcttcacgatatcactgcttaccgggcctgcggcgatggtgacatcctgataaaggataggccgttgggtccgttgatcaagcaactggggctgaatcggctcaccgctgtggcgatcgaccagaatcactgcggccccatccggagccagatgcttattaccccaatcaaacattgccaccaataccggaaaaaaatcgattccgcgttgagtcaggcgatattcatagcgagcggggcgggcgtgatacaaatgtttgtctagaatgccactggcgaccagatgtttcagtcggcgagttagcatggtaggcgaaagctgtaaacttttctgaaactcgtcaaagcgcgacaatccctgaaaagcatcgcggaggattaatatgctccaccactccccaacgcgctctagggaacgggcgaccggacagggcatatcgtcaaaatgggttcgttgcattagctgccggtaacctcacgagtcgagtaaaactaaaatgagaagcaaaacgtcagtcactacatttatagtagtaactatggttcaaaaaaatgccgtttgactggcactgttttcactttactggattacgcagggattgagatgctctctccctgcgcagaaacgtttagaacgcgttagtgtctttaaacaagcccactttcagatcggtcgcggtataaatcaccttaccgtcaaccaatacttcgccgtccgcgacgcccataatcagtttacgcataatgacgcgtttgaagttaatgcggtacgttactttcttcgcttcaggtaatacctggccggtaaatttcacttcgcctacgcccagcgcacggcctttaccttcaccacccaaccagccgaggtagaagccgactaactgccacatagcatcgaggccgagacaacctggcatcactggatcgcctatgaagtggcaaccgaagaaccataggtctggattgatatccagttccgcttccacataacctttgttatgagtaccgccgtcttcggtcatcttcacgatacggtccatcattaacatattacctgctggcaatggtggtccaccggcgccaaacagttcgccgcggccagatgcctcaaggtcttcttttgtataggattcgcgtttatctaccatgttctcagtaagccttattttattgaaggtcgcagattagcgtacacttgtacgctgaacaagtccgatcagccctggttaaaccagttgagccagcgtaatggccaaggtcggcgtcgatcctgtggattcatttgggcaatcctttcctgaattatacctaacaaactggtttgttgttcatcggcataaggcaggccggtcagaagtggtaacgcttcagtgacggaatccacggcccacagatggaattgcccgttctgtactgcttcaaccactgacgggtgcaggcagagatggcgcacattggcgctcggtaaaatcacgccttggctagcggttaatccacgacgttgacaaacctcgaagaaaccttcgattttttcatttacgccgccaataggttgcacattcccaaactgatcgacagaaccggtcacggcaatttgttgattaattggctgttgtgaaagagcactgatcaatgcacataactctgccaaagaggcactgtcgccgtcaatttcaccgtatgattgctcaaaaacgattgatgcggagaatggcatcggctggtcaagttccagctccgcattcaggaatgcctgcataatcatcatgcctttagcatgcagattaccgcctaactcggctttgcgttcaacgtcgacaaattcgccgtcgcccatatgtgccacgcagctgatgcgcgcgggttcgccaaaggctcgcggatggccaggatattccagtaccgaaagaccattgatttggccaacaaccgcaccttcggtgtcgatcagaatctggcccagttcgatttcgtcctgcatccgctcggccagataattctgccgccaatcgcgattatttgcggctacatccagcgagttaccggtaatttcatcttcttcagcatacatggcggcttcggctaactggcgagttaaccattgcgggcagagtggtaaactgccctgatcgccactgtgacgaatggcttgtttaaacaatactggccaagcgtctgcggacaaaggcggcaaattattctgctgtactaacccgttgatataaccgcaccacagcgccatgccttcttcgtccagcaggggcaattcagcttcaaactcgccgtaaatggccagctcacccagctccggttccatatcatggaaatcccctagaccgaggcgatcgccaaccagaaccaaacgcagatcgagaggcatagagggaatatgtaatggtaaaggcttggtttcatcgggagagagccactcgaaacgctgctgagtcaccatttgctttaggcgtagccacattaacggctgcgccagcagggaacgtaccgacagaatcagcacgccgccgttggcctgatggaccaaccccggttgcaagctgaccgtatctttatggattctaacgcaaccaaataattgctctggctcaatccattcctgacataaacaggtagatttggcagcaaaagcctcattgccatgctgagctggctgccagctcacttgatggccatgtaccagataatcaccgcccgctagcgtcggcgtttcatttgccagcaactcattaattgcctgggagagcaggttgagatagtcgctactctcttgcgccttgatcagcataaagcgcggcttggaaagtgggtgacagaatagcgtcaggccattttccaaccggggctgatatgccgcaaaagatacgggagccaactgagtggcggtagcaaacaacgcctcatatggcgttgtgtttggcagcaaagactgccattcaagtcggttattggtcaaagtgttagatgcaatcgtcaaaaagggaaagggcgattatacaagaataacgcaggctgcatatacgcagagtggctgttgtcgacaaggagtgtgacatcctgatatttaagtacaaaaaacagccaaaatgaacgcgatttgcagggggaaatttcctataaagctgttatgcttactgaagttacgcggtcactgaagagatcacgatgaaatatcaacaattggaaaatcttgagagcggttggaaatgggcctatctggtgaaaaaacaccgtgaaggtgaacctatcactcgccacgttgaaaaaagcgcagctcaagatgcgattgaacaactgctgaaactggaaagcgagccggttaaagtccttgagtggatcgatgcgcatatgaatgcggatttggctaatcggatgaagcaaaccattagggctagacgtaaacgccattttaatgccgagcatcagcatacgcgcaaaaaatctatcgatctggaattcctggtttggcagcgtttggcggcattggcgcgcagaagaggacatactttatccgaaacggtagtgatgttgattgaagatgccgaacggaaagagaaatatgccaatcagatgtcatcgctgaaacaagatttacaggcaattttgggtaaagacgattagaaactgaatgagaagcaggcgttatttgttggcgtttcttgcgattctggtttttggttttagatgacgaaaacggttaaaaaaaaaccccgcaatgcggggtttttattaagaagtaaacttaagcctgtggctgagttacaacttctttgatgcctttcacttcgatctctacgcgacgatctggtgccaagcagttgatcagtgcagcacgtggtttcacgttgtcacaggtgttgcctgtaactggatcagcttgacccatgccacgagcagagatcttgtctgctgggatacctttagataccaggtactctacaacgctgcgagcgcgagcttcagacagtttcaagttaggagcagcttgaccgatacggtcagcgaagcccagaactacaacagaaccgtctttaggatcgatagagctcagctgagagtacagttggtccagagcttgctggccttctggtttcagagttgctttgttgaaagcaaacagcacgtcagatttcagagtgaaacgcttagtatcaacaactggagccggagctggagctggagctactggagcgactgcgtcatcttgaccgaaacggtaagaaacacccaggctcagcatgccgttgtctggacgagcaccaacggtagcagcatcaccaatgttgttaacccattggtaatccaggcgagttgcccagtttttggttactgcgtattcaagaccaacggctgccagcggagaaacgccagtgtcgtggttgctagcgtggaagttttcgctaggcacgtttgctttagagtctgcacgccaaaccataccacccagacgagtgtacagatccagatcctgagcaattgggtagctcagtttagcggctagctgaacgccttgtgctttaaatgcgccgttagtaacgtcgcctttgtaaggcatacggccaagccagtcatatcccatttcgaagccaaggtattggttcgcttggtaacctacgaacgcacctgcacccagttggtccttgtgagttgggccgtcgttgctttcgttgtagataccactgccggtaccgacatcatggtactgagaccagcccagtttaccaccggtgtaccaggtattatctttcggtgcggcttgcgctactgtagcgaaaccagccagtgccactgctaatgcgatagctgtctttttcattttacgcctcgttatcatccaaataggcaatgagcttttgtaaagccaagcccttggttaaaattcttcgttaaggttttaacgctcccgttgattcacgctgccagtttaatttggcgttttagagcaaccttagcgatgtaaagtctacaacgtggcgagaaagttacaagtgtgatgtgataaaccgcctgaaaaaaaagcaaaaatgagcaggttttttaacacttttggcataaaaatggtcatttttagaacaatattttatgctgcaagccgcgtaatgactcgctttgcactgatattcagaggttcccatgtaattcacgttaaatttcatgggataaatcctaaatttacttaatgatacaaataagaatgaatttttagcgttggacactgtccttggttcgattttgtgtcactttgcggacgcataatgaacccatatgcatttccctgctcggcagctaagcgaagccttagtcggtcttcatccgttaaatcaggcaaccaaccgagcaccacactgtaatttcctgtctgtagcgctttttccatagcttcaacggtagataaagaatctatctggcttagctgcaccactttatctacgggtaaaccggatttctcaagccataaacggctaagcttctgctgtggtgttaaccatagcaaccagcgggattgtttgcccaattgttgcagcaggggaacgagcagttgaaccactgcggactgattctcactataaacaatttcactgataagtccgctacccacaggggaaatggttcttgttgctaatgtattagcagcaaaagtatgactgttggaattatgaggtttaagtgaatgtgtgcgcatgtgatttcctgcccgtagtgatactgtatgaatatacagtaatgggtgtttgatggaagatcaacctaatttttcaaactgcttcgcaaatttgcgatgaaatttaatgcaaattaattttgtaattggatagtcgatttatattgcgtatttttgcaattagttgttcctcttacacttattgcatcaaaattaggactataggctaatcatttgctaaaggagtagcgatgaagcatttatcagaaaaaaggattgcccaggctcaggatcgttttgcttttctcggcccgattacatttcgttctcaatttggcgggtatggtttgctggctaacggcatcatgtttgcgttggtttctgaaggcgaaatgtatttacgtgcaaacgaacgtaccgaatacacattcaaaacctacgggatgtgctgtttggtttattccaaacggggcattcccgtcacgttgcgctattactggattacgcccgagttatggcaggatgaatccaacctttccgcatttgctcaattggcctatcaaggagcagaagaagatgtcgttaccaaaagcagggaaaccaatcgactgaaagatttgcctaatgtgaccattgctcttgagcgtttactgtggaaagtcggtataaagaatgcggatgaattgaggagtgaaggagcaaaacgcacttatcttaggctcagggccttgaggaagtccttggggatcaatgtcctgctctcattagccggcgctattacaggcaatcatcatgccgttttacctcgtcgaattcgcaatgagctgatggaatggttcgatgatgtaggaatgccggtcagcgcttgttataaaaactgaaggcgatgaacgttcaaccaacgatgagtaacgcgatatgcctttaagtcgtaaccgagtgaagggagtcacaggccgctaaaatatcaacaacctgtgactggcaggtgagtatcaccgcattatttttatgaattacgaatttctctggccaatttgtttatttaatacggcaagctcaggtagcagttccagtaacaatcctacctgctgtaataccagcggttctttgctttcaggatcggggctgaattgcgcgctacgtgccgaaagggcagccagcgctttgttcatgcggatatcgtccaccggttcttcgctaagcgccgcttctacataacagatagcgtcatttagtagctccagaatggctggattggtcagtttctcgcggtgcgcgcctagcgccgagatgtagctcagcatggtgtgattcaggcacagcagtcggaatgccgcctcatgtgttttgcggtcattcttaggctctgcggacatattggaaataaccgaagctaactcagcatcgctattgtgcgcatcgcggcgggcaatcctataggtcaggctgttgtcctttccctgatggtattgcagcaggatggcgtccagatagcggcagttggcgttgaaggtcttgttcaccaccgccggcagatggcggaatttccaatctggccagataaaggaaacggcgacccaggcaatgccgcagccgagtaaggtatcaatcacacgtggcatggcgacctcaaagccttcacctaacaggttgaagcacagtaacaccaaaagggtaataaacatggtggcgtgggcgtactgcacattacggaaggcaaagaacagtaccccggtaatgacgattaaaatcaactgcccttccagagaaggcacaaagtaaagaataggtaagccgatcagaataccagcgagggttccgatgatcctaagagctaaacggcggcgggtggcgttgtagttaggctggcagacaaacaggctagtcagcaaaatccaatagccgtgctgcatgccggtgaattggataaatgcgtaaccaatacagagcactacggacatgcgaaccgcatggcgaaatagggctgactgcggcgtcaggtggcggctgattcggagccagatatcgccccaaccggtaatacggtcgtcggccagacgattttccggcttagcttcttcggccagtacttgctctgattcgataccagcaagctgggcgtcaatggcacgcagatttctaagtaaataggataatgctttaacctctggaaggtttttatgtttttccgacattcgcagaagcgtagcgtccagatgagtaaacgctcgctcaaagcgcgggtcgtgctgatatttttgacgcaagaggatggattgcgataattgctggcaggctctggcctgcatagttagcagccgctggaagcggaacagcacatcgctaaaacgaaatttctcccgcaggctttggtattgcacatgggaggaactggcgcgctcatgaatatcctgtgcgacgaaataatagtgcagtgtacggcgggtgccccgttgcccgcgatctcctttcagacgggttacgagggaaaccttggcctgattcaaggtcgaaaccagttcgccgttggccatggcgacagcgatcagcggctgattgtcattcgcttcgatatcaggatcaaacagattggctttggcttccagataatacgaaagctgctgataacagcgtgccatattgtcctgtagtgggcggatagggaaaatcagatggccagctagcgtcagcaggttgtaccaaacagcccccagcagcaaaagcaacggttgttcataccagatagcgtacatcgatgtacccagcatggtgtaaatcgcgatcagtaaagcgccaaaggcaatggtggcgtagcgttgtccaagcgcgcccagcagaatgaatccgcaggtcgaaaaagtcaggccaatagcaaatagccagggatagggaaagagcaattcaatggaggcagaagcggtaaagaagcaaaccaatgtaatcaataaattgcggatgcgtcctaccagcctgtcgtccagatctgccagagccgcggctacgactcccagagtcagaggaatagtcagtgtgggttggccaagccaccaaggtagcgccgttgcgccagtcagggcgataaaaatacgaacgtaatacaggaagctgctgttatatgcatagcgacgtaaatcagaaacaaaagtgagcacaaaagacccctaaaacgaacaaaacagcctgaccgaattgagcattacctaggctaatcaacatagcttttaggcaaaaaacgaaccttacactcgggcaaaacagattcactcgagcgtaaggcatcattctcaatcagcgttgctgaaagcggcgtttagcattctcggttctggcttgttgcgccatttcaaccgaaaccacccggcggccgactggccataaggctatcgctgctattttaaagttagcgataccgacaggaataccgatgatggttaagcactgggcaatcccagccaaaatatgggaaatgcacagccaccagccaaacagaataaaccagataatgttcaatactgaacctccggttgttagcagagcattacttttttccgggtataattcattgacatggatcgcctcattgccataaggcagaaaggagagcttggtaatttcccagcaagagcgggttaatggtaaggtaacgatcaacagggcgctgaccagcgtagccaccagccaggcgagcgttgtgaagaaaccacctaaaacaaaattcaaaatgttcaatgcagtacgcataatgattaatctgcctgataaaattgaagagccgccatgcgggtgaatctagaagtgatcttccttttcccattattacgcgtttttgacaataacccgtaaactatctgatagctgttgtttaaactcaattattttatttacactccattttgatacgtaaactccctcaatactagttttggcgcaggtatatggaacttaaagcgacatctttcggcaagcatttggctcaacatccctacaatcgggtgcgattattgaatgctggcatcgaagtgagcggtgataaacatcaatatctgattccgtttaatcaattggtcaatattcaatgtaaacgcggcatcgtatggggagaactggagtttgaactgccacagcagcaggttgtccggttacacggcaccgaatggcaggaaactcagcgtttctatcagtatttgttaggcgtctggcaaaaatggagcgaggaaatgagccagattagcgcagaagtgctccaggcccaggtggcttcgatccgtaaaattgaacaacaagataaatggtttaagcattcggatttggcgcaattgcaagaaagcatcaagcaagcatttggcgcgttgccaatgccgatagagcgattaagtgaatttgagctgtgccgcgacgattatgccctgtgcctgcgttggttacagcagggtgcccggagcgttgcgatgcgtaaccgacaatggaccgaccgcgtgctggaacaacaccgcgacttcttccagcaggttgaaacctctcctttgaacgattcccagtgtcgggcagtagtgaatggggaagattcggtattggtattggctggagcgggtagtggtaaaacgtcggtgctggtggcgcgtgccggttggctgttacatcgccaggaagcgctgccggagcaaatcttgctgctggctttcgggcgtcaggctgccgatgaaatgaatgatagaattaagcaacgtttggggacaaaagatattcaggcgaaaaccttccacgcgttggcgctgcatattattcagcagggcagtcgtaaaactccggttatcagtaagctggaatcagacagtcaggcgcgtcgctcgctattgatcaaaaactggcaacagcagtgtgaagaaaagaaagcgcaagccaaaggctggcggcagtggctgaccgaagagttggagtgggacgtgccggaaggcagtttctggcaagataaacgtctggcggcgcgtttgggagggcgtctggaacgttggcttggcctgatgcggatgcacggcggtagccaggctgaaatgattgaacaagccgatgaggaagtgcgcgacctgttccagaaacgcattcgcctgatggctccgttgctgaaagcgtggaaaagtgcgttgaaggacgaaggtgcggttgatttctccggcttgattcatcaagcggtgaatttattggagaaagggcgttttgtcagtccatggaaatacattctggtggatgagtttcaggatatctcgccgcagcgcgcagtgttactttccgctctgcgtaagcaaaatacccaaacatctttgtttgccgtaggggatgactggcaggccatttatcgtttcagcggagccgaactcttgctgaccaccgcctttagtcatcattttggtgaaggagcggaatgtgctttggataccacctatcgttttaacgatcgcattggtgagatagccaatcagtttatccaacaaaatcctcatcagttaaaaaaaccgctaaacagcctgagtaaaggcacgaaaaaatccgtggtaatcctgccgcatgaacagcttgaggcgctgctggataagctgagcggctatgttaaacatgatgagagaatcatgattttggctcgctatcatcatttacgtccggatattttgcagaaagccaaaacgcgctggcccaaactgaatatcgattttatgaccattcacgccagtaaagggcagcaggctgagtacgtgattatcgctggtttgcatgaaggcagcgatggattcccggcggaagccagagagtcggtgttggaagacgtactcttgccgcaaccggaagattttcccgatgcggaggaacggcgtttactgtatgtcgccatgacgcgggctaaacatcaagtgtggttattacaagacagcgatcgcccttcagtctttgtcagccagttacgcgatcttggcgtgtcagtacagaagaaaccctgacaggaaatggttgcccccgcaggctttggcccgcggcgggcggattatttcagacgatcttgcaggtagcgctggtaatcgggaatagcaatctcaatctcccgatcgaatagcggcgagcagacgagaaaatcagcggtagaacggtttgtggcgactggaatattccacactgtggccagacgcagcagcgcttttacatcgggatcgtgcggcaccgcatttaacggatcccaaaagaaaatcaacatatcaattttcccttctgaaatcagcgcgcctacctgctgatcgccacccattggcccgctgagcatactgcgtaccggaatccccgtggcacgttgcaccagatttccagtggtgcctgtggcataaagttcgtgtcgcgccagtagctctttgttgccttcaacccaggcaagcagcgattttttacagtgatcatgagccacgagggcgatatgtttcctcgccgcaacggttcgtgtagtcagttccatgaaaatccttaaataactgaggtttcccgacagattactgaaactggaatttggtgcatagagggagcgcaagaaattgcgagaagggattgaaaaatacgatattcacatcagattctgccgcattcgacttttggccgctttcattggcgagcctgcgcgagagaatagggggttatcctgacaaacacgtgagtcaacagcgcctattgttttgccgcgtgtttcctggcccaaagcaaaaaccgctgttgggtttctttatctgcctgcaaataccaatactgtagcatttgctcagaaacgttctcaccgttcaggcgcgtagttttgtcggcgatgccgttgcctgctgcgggtagcgttgtaccgggcaccgcgctaacggttgaagggggaatcgcggcgaaagagggaaccgaggctttatgattgcctaagttatagattgccatgatgttttccagagaagcgctactggttaaatcatccggatgcagcatatcagaacgtaccggcagaatatgagcattgtgatcaatcagttgatacagcgggtgatgagaaaatttctgtccttcttgcgtattagtaatcgttggaaggtggatggcgacagatttcacgttttgggtattaaacaccacgatcagcggcggtgaggtgtaaaacatttgggcaggtgtgctggacggaagatttttagtaactttaaacagtatttgatgctggccgctgttcagctccagactttccgcgccttttagcaaagaaccggacatgtttttaccgtcaacgaccagcaagtcaatctcaggcgacagttttaacgtcgttgccagcgccgaaccgctagcgcaggcgattaaaactgcgataaccataagaccgattttcatgttccactccttttgcccaatctttgtattgtcagataagcaagataatgcgccaaagattatccctcacatcattataattacatttcgacactttttgtattatttgcttatgtttatatttttgaatttaaaaggaaaaaacaatgtaatttaacagaaaatacattgatcaaggttaaacgaagtcaattgtcggctttcttttcagcctctttggctgatgatatacactgagataatcgacccgatcccgcgctcttttgggacacgaaccggtgaaataagttctatttattatgcacatcagaggaactgaaatatgcatgacaatgatattgctgaggtactcaaaaaaaccaaaactatcgcattagtcggagccagtaataatcctggtcgcccaagctatggcgtgatggcttacctgctttctcagggatatcaggtgattcccgtgagtccgaagctggcggggcaaactttattggggcaaacggcctacggtcaactggcggatatccctcatccggttgatatggtggatgtgtttcgtaacgccgaagcggcttacggcatcgcgcaggaggccatcaccattggcgccaaggtgttgtggttgcagattggtgtgattaatgaacaagcggcggtgctagcggccgatgcgggtcttaaagtggtgatggatcgttgcccgaaaattgagattccgcgcctgggtttggaaaaagcctaaaatcattgcatgcgctatctcaataagctgtcttggcgtcagggcaaggaaatggaaagaaacgataaaaaaacccaacgctgaggttgggttttcatcaggtttaacgtttaggcgataagccttagttccgtaatctcggtgcctgtaactgatcgcgaatagaaaccgccaattcgtctaatgaaggttgatcaggatgagcttcctgtacttcataggccaactgagcctctgccagataagtatgtatcgcctgaccgcgatcgtcctccataacaacgtgataccaaggcgctaatcgcagagtatcgctattaacgacgtcttcaggttgaggttgatccaaggaatattcgggatctatatcgataacaacacccaaataaccgagtagtttatggcgaacttgctggccaataccgaatttgctggcgatcatagtaacctcctgaaaaacatttcgctgccttctgatatgagggcagcgcaggacatttcaagttacatcaccttcacgttacatcactcgacaggcaaaacctttcagatacaaaccttccggataggttgcgataaccggatggtcggccgcctgacggaactgctctacaaattgtatatcacaacctgcatctagcgcggcatcggccagaattttttggaacaaatcatttggcattaatcctgaacaggagaagctcagcaaaatgccgcctggacgcagtaactgtagcgctaacatattgatgtctttataaccacggcaagcgctggccaactgatttttattttcgacaaacttcggcggatccataatgatcatgtcgaatttttccccttgcgtgcggtaattccgcagcagttggaacacatcatcacgaacaaattcggctttgctcagatcaagctggttcaattccacgttttgtttagcgatatccagcgccgcctgtgaggtatccacgctgataacctgctcgcatccgcccataagggctgaaacggcgaacgcgccagtgtatgagaaacagttgagtacgcggcggcctttggcataattgcgagcggccaaacggctatcgcgctgatccagataaaaaccggttttatgaccctgctggatatcgaccagcagtttcatgccgtgttcctgaatcggtagcagtgctggtggaatatcccccaaaataggaccttgggtcagttccataccttcttttttacgaaccgatacgtcggaacgatcgtaaatggaacactccggatagcaatgctgtagcgcgttgatcaaggcaccacgctggtattcagcaccggcagacaacagttgtagaacaaagaagttttggaaacgatcgatggtgacgccaggcaaaccatcagattcaccggcaatcaggcgatagctgtccagaccgtcgcgcttcgcaatccagtcccgccagctttgcgcttgctgtaagcggcggataaagaaatcgttgtcaacggcttcgtcctgttggaaagtccaaacgcgggcacgcagctgtgactctggcgaatacgcgccacgggccagccatttacctcggctgtccataatatcaacggtttccccaggaagcggtttgccttcaacacgttcaacggcgccagaaaatacccaaggatgacggcggagcagggacttttcgcgtcccatagcgagaattacacggttcataataatcttttataatcaattcgttgggattgataacatattatcaatcaaaaattaggccacaatcatatagtaatatgagatgagtcactactttggcggatgggaacgctatgagtgtggatgtattaaattttaatatagaaatattaaaatggtgagatgaaagcgtaatttatcactcaagccggtgtaaaagaaatgtattaacagatttttattccggcttaagccatttatttttatgataaatcaccgcaggattgcctttttgcttctgataacaatcggtggttttatctataggctttgggtattaaggaatatgttcccatttgatatccaccacaacgccgataattttacagtttccgttgataatagtcggcggatgatgcgggtttaatgccttaaggtacttacgtccagcatcggtcataaactgtttgaacgtcgcttcgttttcattttccagcttggccaccaccagttttccgctgaccggctccttctctggatcgactaaaataatcattccttcgggcacggtaaaccccgttggcgcggtcatggagtcacctttcacccgtagccagaaagaaccggggctggcatttaccgtggtgtcaggccaaatatcaatttcatctctgcgatagggttctaccgcttccagccagctcccggcgctcacccagctaatcagcgggaaggtgccaaccgtagatttttgcccaagataactcacgttattcgaattggcattctctccaagcagggcggcctctttggctaacgtaggactgaaatcggcaatagagacctgaagatgtttggcaaatgccgccgcgaccttggtgtttaatggattccggccgttcaggtaatggccaatcgcgccttggctgacgtcaaggtcatcggctatcgcctgttgggtgatatgcagcgattttttctttgcctcataaagagatttcaaacgcatcgcgtcttcgatctgttcgggcgtgagcggttttttcttttccattcactcattctaataccagagctattaaaataacaataccgcagatattgatttgataaatacttgcggtattattaatgggtatttattcatacggagaagacctgtgaagcaaacagcgtctggcgatgatgcaagtgtcgtgtggtttcatagggtcgagcggcgtttaaaatgggtaggcgtgttgttcaaccaggttagcgacgtgataccgacattgctggattccagagtgacggagccaaatagctatggacgatagtctgcgaggcaaggtgattggctgagctaacgcgacaagagcgttgccaacacaagggtttacgaggagtaaggatagggaaccctgaccgctagtaagaactgagaacgttgcggtccggcgtagggatacgtcaaggagcggcatagatttttatttacgtctatctacggatgggcgtgcaggcgaggaaagcaatatgaacctggaatcagcgacaaagtatctattctgtaaatcacaatctttcaccgatagccctggtgcgacgggcgatatattgaccggcgccgatgtgatgggagctttcggcctgtgtcagtccaaggctgaactcgggtttaaagcctattcagggaagctgggtttaagtgctggtgatgccaaagatgcgattcagttactcactcaatatggcatgacccaatgcgataaggtggcagccttacgtaagctggatggcagggttaaagtgaaagtcgtacagaagctggcgggttttgcctatcaggattattgccgcagcgcctcaggcgttgaggaatgttcttgttgtaaggggaaaaggttcgttatcgatagggtagcaacggcgaaagatcgggaaaagagagcctatagccagcctactcaggttatttgcagccagtgttggggaaaaggcgtggtttccgttgcctgccgggattgccgtggccgcggtgtcgttgtggatcaaaaagagaccgagaaacagggccttccagtaaagcgcgattgtcagcgttgccgcggtcgcgggtacgagcgaattccggcatcaaccgcatttcgggcagtgagttcgctgactaacgccatcagtgccgcaacctgggataaaagcattaagccattttacgattcgctgattggccagttggagcaggaagaagtccgcgccagtaacttattgagtaaagcaattaaatagctaatgaaaaaatagtgaattattttatcgttagctatttatttttccgaaaattggggtaaactgcttctcatagtgggctacttataaaggctcatcagagaaaggcctcgggttaaccaccggggctttttgcatttataggtacttagtgaatatcattgtatctcgcagctcatctgttttcctgatgcagactgaggtagatatattaagtaaagcggtgatcaccctgattcaccccaaatatcaaatccagcatctccaacggatgccaggatgagtcaatcaaggcctcgcttctgcggggctttttcgtatctggctctccgtcaaactccaacgtctacacgcccccgtaacgcgaggagccgtggcggagagctattcctgttgacacctgaatcttaaaaatgcccagccagaccggcagggggaggaggctatgcgaatggataaatatgtcagtgagttgtcttgctggcttggtggtttgacggccgcgttgggcgagctttcgttgaacgaatgggcaattatcatcggaattgtctgcaagattggagccgttggcgtgaactggcactacaagcgaaaagaatttcagttaaaggagaaatctaatggctcccgctctacgtaacaaacttctggcgtcctccgctggcggtgcggcgctgactctagctttggtgggcggtcatcacggactggaggggcttgaatatacggcttattttgacgtagttggcgtgctaacgctctgtgatggtgataccggtaagaaaatgagcgctacagcgatggggagtgcgataagcggcgaatgctgcgaataaataggtgtttaattaataccttaggataacaaccgctggaggcgcaggaagccctctgttcagatttgctcatgcaagtcttactcaacggttagggatgagctaaccaaaatcgcagggatgaaaacccttctcaaggaattgagatttcgaactttatcactcatctctgctggcttagaccggtttttttatagctaaaattggagtattaccttggtttcgatttacgaaattgcgcagggatctattgtacttcaacgatggccaaccgttcgataatcccacagggcgttggatagatctgcgcttgactatgccggaattggatctgggaatacgtcaataatattaattgttctgactgtatttggcgtgagacgagcctaaggccataatgagatggttgcggtgagataacagaaaagtagcgataataagtttggtatcggaataaagtttggtatcggaatatatgcactaaaaataaaaatgagggaataaatatgccaaaagtctgtatcgcggcctatgtttacggtgtggttcagggcgtggggttccgtttttgtacccaacatgaagcggttagtcgcggtatcaccggttatgcgaaaaacatggatgacggtagcgttgaagtgattgcctgcggtgagtcagaatcagtggaagagctgatggcgtggctgcggcagggcgggcctcggggggcaagagtggatcgggtgttgacggaacccagagcggttgaagtatttgaaggcttcaagattcgttattaaaccgccggccattaggccggtcagtttatgcagtgagtaacagatctgaacgatcaaatacattttaccggtttaggtaaacctgcaatcttggtggcctgtttcgccgggccttttggaaaaaggcggtagaggtagcggctattgcctttctcctcgccgtatttttgcgccatggctttgaccaacatgcgaattgctggcgaggtattaaactcctgataaaacgctcggacaaagcgaaccacttcccaatgcggctcggttagggtgatgtcttcctgcgcggctaaaataggagccagactttcagaccagtcatcgctattcttcaaatacccctgagcatcggtatcaattatccgaccttcaaactccaacatacggcctcaattatgcaaaaaaccaaatcagcggttaatttagcaaatattcgtcggtatcccaaaaatgtctgcgataaacaggaaagtggcagtggactgcaaagataaaccgcaatgcgccatttttcatcaagctgacgataaattcggctttcgttgccgtggtgacggatttttgtccaattaaaccaaatcaggctttacaagccaggtcgcgctgtttatagtgcgcctcattgcggaggggtggccgagtggctgaaggcaacggtcttgaaaaccgtcgacgggaaaccgttcgagagttcgaatctctcctcctccgccattcacttcttggttatctcttggttttactctttattgacctctctaaaatccaatatttcctgattgaacgttacgatctatttttaccgtaaacgcgtgtttgcatttcatcatttgttgtcgctatgcacaaatattcccttcaaacagaagactgttttatttgcttagcggataatctcgctatcaatacctgcaataaaacattcacaataacattttcacaataaaagaacgctactgcctgtttgaagggaaagcgtcatgcggctgttatatctggataaaatcgactgccccgccgtctaattggtacatggctccgataatcttgatttttccttctttttccagcttattcaaaatatcgctgcgctcacgaatagtttttatcgtgttctctacgttagttttcgctaccgcatccacgaaagcggcgttattgcccgagcggtcgccgctatattctgttgccgcaatggccggttttatttgtgccagtaacccggttaaattccccagctcaacattatcaatggctccgcggatagcaccgcaggcggtatgccccaataccagaatcactttggcaccggctacagcacaggcaaattccaggctaccgaggagatcgttattggcaatgttgccggcgattcgtccattaaatgtttcaccaattccggtatcaaaaacaatttcagccggagcgcgggagtcaatacagcttaatatgaccgccgagggaaattgcccactggcgctggcgcgtttttgcgctaaataatcgtgttgctgcatttttccgtgtcggaaacggatattaccgtctttcaaaccttgaataatctggtctggagtgagtttatctctttcttctttggtcagcgctgcggcataggttactccggggctggttaaaccaatggcaccggtgatgcttagtgctgacatgccaatggccgcttttaataatgaacgtcgtttatttggcgggccgttctcaggatctctggtaggaagtgattccatttttattacctcagggcgaataaaagcagagaaaaaatcagatgtaactgtatgtcacccagaatgggctcctataaatgtagctcattatttgtacggcgctgtcatgtcagtttactggctcatcaattgcacaaattcccgcgcggctttatttagcgactgattctttagccaaacggcgtgaatcggtaatttcagctcgtttttggtatttttaaaatgcagttgtttcaaatgtccttgttttagtaagggttcgatcaatgaaaaaggtagattgccccaacccaaaccggcttctaccatgcccaatgccatagccagcgtgtcggttcgccaatagctgcctgcaaccagcggacgagtatcgctgatagggtggctcatgctggcaacgatgatctggcgaatggtgactaaatcttcaatataaagtgcatcattggcattttctgccgcccagtggcgagctgaaatagtggcaatcaatgattcactgcccacgtattgaaattgttcctgcacgttgatgcttagcccgccgaaggccagcgccacgctgactctgccgcagtgcaacatatgtaacacatcatcctgcggcgcgctgagcacctcgatattcagcagaggataacgttgagacagaattttcaacgccgccagaaccggtgttttatccacttccgccgccatagctaaagcaaacgtgctttccaatccttgagataattcgacggcgtgaacccgtagctgctgaagctgctgagcgattattcgcgcctgtggctccagtgctaatgccaatggcgtcgggattggttcgcgggagcgacggtcgaacagcggaaacccaagctcggcctccatattagcaatgcccatgctgaccgctgacggtacgcggtgtaaggctctggccgccgccgagaaggaccctcggtcgataacggctaaaaataactcgatattttcactggaaaaattcattcgtcctcctatcagtaaaactgataatagctaacttttaatgtcagtacgaatgacgatatcttggcggccttaatcgatgggcgacggagattgctcatcagcgaataataatgaggtggttatgcaagggttaaaaagaaagctggtgtacgtcacggcatatgaaattattgggctggtgatttcggctttggggttggctttgctatcagggacttcgccgggaaatacaggcccgctttcggtgatgattacgactatcgcggtgagttggaactttgtttataactatattttcgagttttgggaaagccgccagctcagccggacgcgcacggttaaacggcgggtgctgcacgccattggctttcaactgacgctggtggtgtatttgattccgttaatcgcctggtggatgaacatcagtttgctggaagctttctatctggatttggcgctcattgtgctaataccttgctataccttcatttttaacgggttgtttgatcggattttcggtttgccaagttctgccatttctattgaaacggccgcggcaaattagccgaatgatataaaaaccaacggagagaaaagggcagggtttgcaaatgaccgctggcgacaacaatcactgccagcggcgttaagatttttatcagatagaattggcggctgagaaaatatcagccgctaaaataacggtcaggctttctcggtgataatttttacgccaactttagtgacgcggtcattatccatttcagcaatagtccaggtcaggccatcccattcgatctggtcaccgataaccggttctccgcccaataaatagatcacaaactgacccaaggtttgctggccatcaattccgtcttccagatttaatccataaatattagagatatcattgagtcgtgcatcagcttccaaaatgaagtcaccgaagaagcgctcatccagagtgatagtaggcgattggctaaataacttacccagcgctggcaaatcgtgttcctgaccgattacacacagaatatcgccttctttcagtcgggtgctaccggttgggtgcagtaagtctttaccgcgaaataacgctgcaattcgagtgccccgcggcattttcagatcgcgcagcgccgcaccaatgcaccatttttccgagctaagctgatagatgaactgttcccattgacggttcatatcaatatctagcccgacgcgggaaatcggtgccagagctgggggaaccaccagtttggttttcctggccgcaaaggacaaactggtgccttgtaatagcaaagaaaccagcaccacaaagaaagcgacgttaaagaataaatgggcgtttggcaggccagccatcattgggaataccgctaaaatcaccggcacagcaccgcgcagacctacccaagagataaaaatacgttcacgtaggttaaagctacggaaaggcagcagcccgataaataccgacagcgggcgagcgaacaaaatcatccacagggataaaatcagcgccggaatggcgatcggcagtaaatcactcggattgagcagtagccccaataccaggaacatcccaatctgactgagccacgctagaccgtcaaaggtttgcaagatcccggaacggttgcggatagggcggttgcccagcatcagcccacacaggtaaacggccagaatgccgctgccatttagcgcagtggttaacgcaaaaatcatgataccgccgctgacggccagtagcggatatagaccgttggctaactcaatgcggttaatcagcagcagcagcagactaccgcccagcaggcccaggataatgcccagcccgaactgttgcagtaaatgtatgatgaacatccagcttaggctggtttcgccggcggaaatcatcgctatcagcgtgatggtcaggaagaccgccataggatcgttgctgccagattcgatctccagcgtagcgctgacgcgttcgtttaacccttttccccctaatagtgagaaaacggccgctgcgtcggtagaacctataattgcgccaattaacatcccctggatgatatccagatcaaatagccaggccgcggccagaccggttaatcccgcggtaatcatcactccaacggtcgctaaagataacgctggccataaagctacgcggaatgatgaagctcgggtgcgcatcccgccgtccagcaaaatcaccgctagcgccaagttactgaccagataggcggccggataattatcaaaaggaataccgccgataccgtcaccgccggccagcatgccgatggcgaggaagataactaaaatcgggatacctaaacgggatgagagtgaactgagtaagatacttgcgcccaccagtactgcgccgattaaaaagagactgttaatagtggtcgcgtccacggtgggggatctcctggtttatgcataaatggcgggttatggatgaaacaagttaattatacacagaaaagcgcagttaaaagctaagatatgacctaattcaaggtgttaaatttgtatttttgaactatctctctggcccaatcgggaaaaaaaagtgttttatcccattgaggaagaattaagcggagctgagcgaggaaatcaggagcagaagcggctcacccgtgccgatggtgcagcgggtgagcacaggcaaagcgttatgcccgatcgagggtgaccagagtgcgtttgactaattcggtcactatggcgcgttcggggttcggcacttctgaaaaggtcagttgtgaaagctcattgaccaacacgctgcgatcttttccgttaatggagccgtccaacgcgctgctgagtcgattgaccaaggcaaaaagggtggaaaactcggcgctgatatcggcatcattcgtcaggtttttcccggtagtgtctggtgtactcatcacaaatcctctgtcatatcactgcgagcgaagcttatcccaatgattgttgctcggtaagaatgcccgattaacgggcatacagtgaggtgttgctgccccatcttgttttgcaaggggtagacagtgtaatggttttaagtggttaacgatattgccacaaccatattacttggtaataacattatgctgtgaggaaacagtgctggctgttttaccggaaaacaagaattttagcagcggaatacgtagatgaatttcgtacagcaaaaaggcgacagggcagacaaacagcaggcccactaggaagcccaaagcgttattctgaatatgcggcgcgataagagcgccgtagatcaaggttaacggatgatgcaccaaataaatgaacaacgacgcgttaaccagataggtaatgccggacgatgaggcgttaagcagacgataacccaaagaaaacaccacgttagtcatggtgatccccatcagcgctttgataaggatatccagctcgaaggaaaaataatccgggttaaacacttgttgattaatacaataggcagccaataggacaacggaagcgattaatgccatcggtgaaaactttagaaacacttcttttagccaaaggtatttaaaagtcatggccccgagaataaagaaaggcgcataaaacagcgtttccataaccacaaaattaaaaacactattaaagagtaattctggggagagtataaatattattctacgaaccacagaatataataaatagaagagaaagaaaaacagtgagattcttcctaaactattcaatttattaatcctaccgttaagtgattggttgatatttttaatcttattgaacaggtaaaggccagctaaggtcagtaatgccaaagttaacaaaaaccagaggtgggaaacgccttcccaaatagcaatatttattttttgataaagtgtaaaagaattccactcctgtaatttatttgtatagtgtttaagcaaaaaaaaattgcggcagggtaatcaatggaatggcggtgattaatggaatagccacgcgttctaggcgaactttcagccagcgccgccgctcatagcgctgatacagcataaaagagaagtaaccggagataacgaagaacacctgcatgcgaaaggcgtggataaagtcattcagcaaggttagagacggcgacgagatactgctgtttactgcccaatggtggctggagtaaatcagcgaaagatgaaaaggaatccccagtaacatcaaataggcgcgaatagcgtccaggaaatattctcgttgtttagtacttttcttcatagatattcgctagttgttataattgagagaataacgcgcttattttatcggcactggataaggcggaatgtaaaaccctactataaggtttattatttttccatagcctattgcaatgaggcttgctaggcttaatgattagttcgtcgtttaaacaatagccataaacatgaaatcaggatttatcatattgtcgccagacaggataatccattaaaatggatttaagaatttaattacccgtaaagggggaattgtgccagttaatattttatcgaaaggccagagtgtgaatcgcgctaaatggctgagtgttgctattttgttatctttattctcttgttcggtttcagcttttactttggatgacgtggcaaaaaaagcccagaatctggcggataaaagttttgatgctcccaagagtaaccttccttcgcaatttcgcgagatgaaattcgccgattatcagcaaattcagttcaatcacgataaatcctattggaataagctgaaaacaccttttaagttagagttttatcatcagggcatgtacttcgatacgccggtgcaaatcaatgagattaccgccaaaagcgtcacaccgattaagtacagtccggattactttaattttggttcggtaaaacacgatcctgactcggtgaaaaacctcggttttgcaggtttcaaagtgctttatccactgaataaagccgataaaaatgacgaagtcatgagtctgttgggtgccagctatttccgggtgattgggaaagggcaggtttatggcctgtctgcacgcgggttggcgattgataccgctttgtcatccggtgaggaattccctcgttttcgcgagttctggattgaacgacctaagcctaacgacaaacatttggtgatttacgcgctgctggattccccgcgcgctaccggtgcttaccgttttaccgtttatccgggccgagataccacaatcgatgtgcaggctaaggtattcctgcgcgacaaagtcgccaaactgggcattgcaccactcaccagcatgttcctgttcgggccgagtcagccttctaaggtattgaattaccgtccggcgctgcatgattccaacggcttatctattcacgcgggcaatggtgaatggatctggcgtccgctgaataatccaaaacatctgtctatcagcacctataccgttgaaaatccgaaggggtttggtttattgcagcgtggccgcgctttctctcaatatgaagatttggacgaccgctacgatctgcgcccaagtgcctgggtagaaccgcggggcgattgggggaaaggcaaagtcgagctggtggaaatcccaactgcggatgaaaccaacgacaatattgtggcgttctggacgccggacgtactgcccgatgctaagcattcgctggatcttaattaccgtctgcactttacccgcgatgaagacaaactgcattctgacaacgtgggttatgtcaaacagaccctacgttctaccggtgatgtgaaacagtcgaatttgattcgcgaaccggacggcagcgtggctttcctggttgattttatcgggccggtattaagctccttagatccgaatatgccgctggcttctcaggtcagcgttggcgataacggtgagctgctggaaaacagcgtacgttataacccggaaaccaaaggctggcgcttgacgctgcgggtcaaagtaaaagatgagaagaaaccgatcgaaatgcgcgcagcgctggtcaacggcgacaaaaccctgacagaaacctggagctatcagctacctgccgatgaataagtcaactcagagtccattacaggattacctcgccgccttgcccctgactgttgagcagcagaaggcattgcgggcggcgttgcctgataacgataaagacgcgctggcccagttgcatcaccaactggcggcgggtcagccggaaccgcacggcgcggcggataacgatgccgcactgtcgtcggttaaggctcgcctgttggctggctggccagatgcattgcagggcggtaaaaaactgtccgtggatgcagaagggcgtactgttattagcgccacgccgccgatcgtgcgctcgcgcatgttcccggaggcctggcgcaccaatccggtggcacgcttttgggattcgttgctcggtcgcaccacggtttcacgttcggctacgccggaacaggcagacgccgagcggaaatggcgcgcggtgggttcaatccgtcgttatatcctgctggcgctgatattggtacaaaccagtattgccaccgtgtatatgaaaagtatcttgccttaccagggctgggcgctgatcgacccgatcgaaatctggaatcaaaactggcaacaatcggtgatgcagctgctgccttacctgttgcaaaccggcattctgattctgtttgccgtcttgttctgctgggtttcggccggtttctggaccgctctgatgggcttcctgcagctgcttattggcaaggataaatacagcatctctgccagcgtagtgggcaatgaaccgctgaatccatcccatcgtacagcgttgatcatgccgatttgtaatgaagacgtagagcgggttttcgcgggtttgcgagcgacttacgaatcggtggcggcgaccgggcaattggaacatttcgatatttacgtattaagtgacagctacgatccggatatctgcgtggccgaacaaaaagcttggctggagctgtgccgggatgtcgatggccacggcaagattttctatcgtcgccgtcgccgtcgggtgaaacggaaaagtggcaatatcgatgatttctgccgtcgctggggtggtcagtatagctatatggtgattctggacgccgatagcgtaatgagcggtgagtgcctgacggggctggttcgtctgatggaagctaaccctaacgccggtattattcagtctgcgccaaaagcctctggcatggatacgctgtatgcgcgggtgcaacaatttgcgactcgggtttatggcccgctgtttaccgccggcctgcattactggcaactgggggaatcgcactattggggccataacgccattatccgtgtgaaaccctttatcgagcattgtgccttggcaccgttgccgggggaaggttcgttcgcaggttccatcttgtcccatgacttcgttgaggccgctttaatgcgtcgggctggttggggcgtgtggatcgcttacgatttgccgggtagctatgaagagttaccgcccaatctgctggacgagctaaagcgcgatcggcgttggtgccacggtaacctgatgaacttccgcctgtttctggtgaaaggtatgcatccggtacaccgggcggtattcctgaccggcgtgatgtcttatctgtctgcgccgctgtggtttatgtttttggttctgtccactgcgttacaggtggtgcataccctaatggagccgcagtatttcttacagccgcgccaactgttccccgtgtggccacaatggcggcctgagctggcgattggcctgttctctaccactttggtattgctgttcctgccgaaattgctgagcatcattctgatttgggccaaaggggcgaaagaatacggtggcaacattcggctgctgttttcgatgctattggaaatgctgttctcggtgctgctggctccggtccgtatgctgttccatacggtatttgtggtcagcgcttttctcggctggtcggttcagtggaattcaccgcagcgggacgatgacgccacgccgtggagcgaagcgctggtgcgtcatgggccgcagctgttgttggggctgatttgggccggtggtgtggcttggctggatcttcgtttcctgtggtggctgtcgccgattgtgttctcgctgattctgtcgccggtggtttctgtgctgtctagccgcagaacgctgggtatggccagtaagcgtgccaaactgttcctgatacccgaggaatataatccgccgcgtgaattggtcgcgaccgaggaatatcttcagcttaaccgccagcgagctttggccgacggcttcctgcacgcggtaatgaatccgtcttataacgcactggcaagcgcaatggctacggcgcgtcatcgggcgaaagagattatcgagcacgggcgagagttacaggtgaatcaggcgttgagtcaggggccagcgaagcttgggaagctgcaacgtttggagctgttgagcgatccggtcatgattgcccgtctgcaccagaagatttggcagcagccagaggcttacgcacagtgggctgatttttatcagcacctgccgcgtaacccgcaggccatgccgagctaatcctgcggaatatctataagttataataacgggcaatgtgttaggcgcattgtccgttttgccttataaatacgcgctgatttttgcgcggatatgccaaccgaaatgtggttaaaatgaacgaccttagacaaccattgactacctgaagagcctgataccgtcgtgaagaaaacattaaatattggactgaagaaaagcctgcgtttgctgctgattctcacgggtattgtgacgctctccggttgcggcagtattatcagccgcacggtgccgggagccgggcacggcaatcaatattatccgggcgtacagtgggacgtcagagattcagcatggaaatatattacggtactcgatgtacctctctccatgattgttgatacctttatgctgcctttcgacgcccagcacggcccttacgagtaacgtcaactctagcttcttgttgggaaaaccagcaagttatagcctttttggtgataggtaaagtttgccaccggcgtcatatgtaacccttttacatgcaccgcgaatgaatgtggattggcatcgtctacaaaagccgctccgacgtcataattagcctgagtgtgttgctttacctcggctaatagttggctaacgatgccctgaccgcgtttattctgagcgacgcacaccggcccatagagaaacactcgcagctcggttagcggtttaccctcaaaacgttgctgcctcagggcttccagcatggcgtcgaccaccggcggtcgcggtcgggcatcggttttcatcatgcagacaaaaccagctacttcgccattatcatcttctgctaccaatatgcccaaatcattatttatcgcggctaactgtttctcatccatgcgggaaacgataaatccctgctttttttgctcgtcactcaagttttcagggatgttttcctgctgtaattgcaggattgccgaatagtcattaaggtgagccagtctgatcttcatcattaaccacgctttttaagttatttgagttaactatgctgtttgggggcgggagaaaatcatgttaccaagtgatgcggtcatgcgcgtagccagaccgacagataatcttgatattatcactgaaatgtatcgtttggggttgaacgtgctgggcagttttgcagaccatcagggttttgatggtgtgattttgggtcatccgcatcacggctatcatctggagtttacccatcatcgcagcacttccgttgggcgtgcgccaacggcagacaatctgctagtcttttatcttccggatccgaacatatgggcgacacaatgtcagcaaatgctcaaagccggttttcaggtggtggagtcctacaacccctattgggacgaaagtgggcaaacttttgaagacattgatggctatcgcgtcgtgttgcaacaacgggcgtggccgctgtaaacggtggtgcaggtgagcgggcagtaaaaagccagccgaaaataaggctggctttttatcaagtctattccgacaaattacgcagttttttcagcgccttgggtgttattcatcatgcgacgaatcggcacaatcagcagaatcaggatggcggcgcagatgaccagtgcgatggagcaacgggcaaacagcgttggcagcatatccaactgatcggcttttacgtgtccaccaatcaggcctgcggccagattacccagcgcggaagcgcagaaccacagacccataacctgaccacgcattctgtccggtgctagcaatgtcatcgtcgccagcccgatagggctaaggcagagctcacctagcgtcaacatcagaatactgcctaccagccagaatggagaaaccccttcaccggtggccagcacatgctgcgctgccagcatcatcacaccaaaaccggcggcggcgcacaaaataccgatgacaaatttggtaatgctgcttgggcgaatgcttttcttcgccagtgcgggccatgcccagctgaagattggcgctaacagaataataaataaggcgttaattgactggaaccatacggttgggatttcaaagcccatgaccatacgatcggtgtaatcattggcgaacaggttgaaagacgtcggtttttgctcgaaggctgaccagaagaaagcggcggagaccagcaggataaagcacaccagcagccgagctttgtctttgcggcttaaaccggcaaaagcgaaaagatagacgaaatacagcgttaccgacgcggcaatcaggtacaccagactgctggcgaccagtaccggattgatttcaatcacgccttgagccaccagtgtgactaccgccgccaatgccaccatcgccgcgcagacccatttaccgacgtttttacgttgaacggtcgggctgttccaactggagtccatgccaacttcggcatcgtagcgagtcattgatggaatcacgaacatgcggaaggtcaataatgccaccagcataccgacgccgccgataccgaagccccagtgccagccgtgggtgcgtaatagccagccagagagcagcggggcaataaaggaacccatgttgattcccatataaaacagtgagaaaccgccgtcgcggcgcgcatcaccgggcttatataaggttccgaccatcacggaaatacaggttttgaacaggcctgttcctaatacgataaagaccagcccaataaagaacatgtcattaccgaaaaatgcggataaagcgatggaaaggtggcccatggcaatcaggatagagccgtaccaaacggcgcgctgttggcctagccagttatcggctagccagccgccgggcaatgaagctaaatacaggctaccggcaaaaataccgacgatagcggaagcattttctcgcggtaaacctaacccaccgtcataaaccgtagcggccataaacagaatcagcagcggacggatgccataaaacgagaagcgctcccacatctcggtaaagaatagcgaactcagaggataaggatggccgaagaaagtccggctattgttggtattagaggattgcataaagtcttcccatagaaatcgcctgttaaggtcgggctgttgtgctgtggtatgagtgattcaatacgccttattctcctgttaatgccgtccgttatcgttaggttatcgggcagtcactaatttcatgaataatcgatttaacactctctataataggatttaactccataataacgtcattttggttttctaccgtgcttatatcccattatttagacgaaaagtcgatatacatctcgttttttagatttatatctgtgggtggatgtggatttttatgacgaaattatagtgcaaatttcgaggctgataatgagatttatctatttattttcaactagttagtcttttttctttagagtgagcttacccctttttttgaacgggtaaattattttttactggaaagagaggaaaatgacagttttggggagaataaggatgatagccactttttaagtgggtataagtgacatttataagagaaaagtcagcgataaactgtgattttaatcacagcaaaattttggcatggaggagggaagatttgcgcttatccggggggagttttagctatcttcctgacgattggccgattgtttcaaagcctgagccggtcgccgtcgcaggcaccagtatgagtagaatgcgttagataacaccaccacggcggtggcgcagaataccgcccggaagccataactggcggaaacggcggcgcccagcagcgggccgctgacgttgccaacgtcccgaaatgattggttgtagctgaaaattcgaccagccacctgatttgtacaattataaatcaataatgtttgcactgcgggcagtagcgcgccgtcggtagcaccgagcaaaaagcgtaatactgccaattgccacggcgtctgtaccagcgccattgggatcaacaacaacaccgacagcgccagcatagcgataagaatacgttcggggccgattttatcgcctaattttcccagtctgggggcactgattaacgccgcaacgccaggcaccgaggcaatcattccgctaacaaatgccagattgtgaatatctcccgccagctcgcgtacgtacagcgtcaaaatcggtgcgattgaaccggttgccacctgaataatcatggtagtaacaaacaggctaagcaccagtttaggatttttcagcgattgtaaaacctgccgtccgttgagcatgtcttttttcaacaccggcgtaaattgctctttaacgcacagtagcgtcataacaaagcacaggaacagtacggcggcggtaataaagaataccggacgtaggccgtagctatctgccagtaaaccaccgatcagcgggccaattaacgcgccgctgacgccgccggtagacaacgtgcccagcgcccagccgcttttatgtcgtggcacctgagtggcaatcagcgcattggcgttgggaataaagccaccgagcagacccagcagggcgcgtaacgccagaaattgccagatattctgcgccattcccattaacaccatcacgatccccatgcctaatgccgatcgtaatagcataatttttctgcctttacggtcggccaaactgccccaaaacggcgacgcaatggctgaaaacaggaaggtaatactgaacaccagccctgaccacatattcagcgcctgatgaccagtcacgccgaggatttccacgtataaaggcagaaaaggcataatcagactgaaggcggcaccggtcagaaaacagcccaaccaagcgacaaataggttccgtttccagtgaataggttctggtgacgaggtcataaattaccgatagaagaatgtgttagctctgcggcacggtttagcgtcatggtgaggggcgttaatatggcaaagcacaaaagcagatgattagcctgttaagtatgcgcctgttgaatagatacatcaaccatttggttaacggtttttataaaaatgaaaagcaggtttattatctaggaataagcatataaattttttgaataagacgatgaggaagatgaatgagtacggcggaaagcgggaaggttaacagctgttagcaaagtacagcgatgtctgaaagcgtgaggggctgagcagggtcagagaaaacaaaagcgataaaatagccgcggggtcttgttcaccccgcgggaatagcgatcaaatctactagatttcccgacgtttacccgaattaacggtaggcttcgtttttggtgatcgagtaacggccgctgcccaacagcataatgatgataccgccgaagaaatacagcgcttcgttttccagcccccaggcacccacgtcggtcagagtaaagaacttaccggtgccaaccatcagagtggccaccagcaggttaacggcataaataaaggccgccggacgggtaaatagccccagaatcatcagaataggcacaatgatctcaccaatataaacgccgtaggcaacaaagccagggatgccctgagcctgtagcatatcggaaatccaactggtgccatgttggatttttgctaccccgtggaatagcatcaaaataccaaaagtcaggcgtaacagtagcttaccgccgtcttgatgatcggttaatcgtgtgaaccactgatttgcactcgccagcatggtgtatatccttatagaaattgaagaaataacctgataataactcttattaattacacacaattatgtgtagttaataatcattctcatagtggataaaactgacagaatagttcaaaaatattgaatctgcctgattcatttcttatttcttttcgtttcctaccttaatttctgactttcattccctgttttggcaaattgatgtcttacaaacctttcagagcagttagcgagtctgacgtcatggttggagtaaattcgatgacttcatatcgggcaacagcgttgaaagaatcttcagccagaatggcatccagttcgtcgcggggtaaggcgatggcaaagataatgccgccagtgcgcgggtttttacgcccggaagcgatgaaaatgccctgatcgtagtatttgcgtaaccaggcaatatgggcatcgagatgagtatcgacttcttcaacgggacgatgataagtgagattaatgatgtacatagctaagccatatggaaataagagaaagataaattcccatgttgattacaaattaacaaggcttggctcggtatttttgtcgttaaaaaagggctagcgttgaataaccagagggatgcagcgttgatttacgccggtgcagagaaagccccggcgtgatattgcgaaaggcgtcagagcgctaatcgtacagcgagggggcgccttccggacgggttttgaagcggcggtgcagccacatatattgatccgttgccaactgaatttcttcttcgatcactttattcataaaggctgcggcagtgacttcgctttccagcgggaagtcttctaccgccggttgcagaatcagttcgtaacctttgccatcgggcagacggcgcggggtgaagggaatcaccgccggtttcgccgtgcgtaccaataaataagtgccggtggtggtggccgcatcgtcaacggcaaacagcggaacaaacacgctgctgcgtgggccatagtcatgatccggcgcataccagatgatttcgccttgtctcaggctacgaatcatccctttcaaatctttgcgatccagcatggatttattggagcgcattcggccccaagtctgcatccaatccattgccttattatcgtgggggcgataaaccccgattcctgggttatgaatgccgaaaatgcgggcacccagctccagcgttagaaaatgtagaccgatcaacagtacgccctgaccattctcccgagctttctcaatatgttctagtccgctgactttacaccaacgattgatgcgccagtctggccaaaaccaagccataccggtttcaaacagtcccataccgacagattcgaagtttttgaccaccagctgctcgcgttccgctttggacatttgcggaaagcacagttccagattacgttctgcgatataaaggcggcgtttgaggaaacgcattgagaaacggccgagggaagtacccagtgtataaatcaccggataaggcagtaaaaccagcaagtaaaggatacccaggcctaaccatgtcagccagtatcttgggtgcagtaacgagcgattaaaagaaggaacttgcatcatgtgttctcagcttcagagtagtaatttaggacagttaacttttacgttatggcggctaatctggggccgctaatcatgctttcaatatgtttatctgtcatttaaggtagttctattgtggcacttttagggaaaaacgcgaaaacagaccgcattaaaaaactattcttagtaacatttgctttatttttgagcaaaataaaccggttttagttgataaaataaacacgcctagcttatgccgctacgcttattcagcaaactgactaattctgccaaactcgcagcagccattttttccatgactttagctctgtgaacctcaacggttcttacagaaacacaggctttattggcaatgtcgcggttgatcaatccttgcgctacccattgtgcaatccgctgctcttttggcgtcaggctggcgtagcgcaaattgacctgatggcgtgaaaccgcctgttcggaatgtttcaatgcctgctggagtgcattaaccaaaggctgagtggcgacgggtttttgcaggaaatcgatagcaccttgcttcatttgttcaaccgccagcggaacatccccatgtccggtaagaaaaactaccgccagcgtgctgcctgcttcacgtaaacgccgatggatttgtaggccgtccagcactggcatacgaatatccagcagtactaccgcggtttgaaacaaatcggcttcgtttaggaaactctggccctgatgccagatacagactttatagcccagactttccaataaaaaacgacaggcatcggtcacggccaaatcgtcgtccactaaatgtatgactgacactaacttgttccttttagtgaggaatttagagggaagaataatcggacctctaacccagctgcgccgttagcggcaagggcgttggttaacgtcattttcccaccctggctgcccatcagccgttggcaaatcaccaaacctaaccccaggccatctggttttcccgatttgaatggcataaatagctgattgagctgcgaaaccgttaatccgccaccatcgtcctgcaaactgagttctgttccttcgggcgtttgattgccgttcagacatagtctccgcgcgccggcctgtaggctgttggtgaacaggttgcaaaatatctggtcgagcaaggttgcagggagcatcagctgtatttcagccggaaggtcaatattcagcctgctatcaggataatgatgtggcgcgccgataagttgccaaacgtgctctgccacgttcctaggtgactgcggaatacgcgtggacgtggctggcgctttgtccacccaaagacgtaggttggcgataatatccgcccctcgctgcgcctgggcgctgatttgctgtaacaccggtagcagcggatgatctggctgttcacgttttaaacggatatcgcagccttcggcgtagtggcgaaccgccgaaagtggctggttgagttcatgagcaaagccggacgccatttcccccaaaatactgaggcgttgagcttgctccagtgcggtttcccgctctcgtagctgctggtgggccagctctaactgctggctgcgacggcgcactaaaaaggccacccaaatatgattcgcacccagcagcagcaatattgccgcgataatcccgagcaatagccggttttgtagtgcccaggaaagtatcgcctgccatagctgcggctgttctggatgctgatttatcgagcgcaacaaggcttcgacctggctggtggaggaaggcgcgccccattgcggctccttgctgaccgttggcgtgagcagcatccgcgttacttggtcagccagcgaatccggtacctgcgccaacgcggcaaatgaccagttggggtataaatcactgctggtcagacagggcactgtggtgggtttagccagtaatgctctgaaatcagaggcctgcaataatccttcgttttgtaaatcttccagcaagcaggtggggactatcgcggcatccagagcgccatctcgcagcaaatacatcaatgtatccaccgggaagccggaaaagtgcagattaaaatcctgcccaggccgtaagccagcgtcccgcaaggctttgtaacctaaaagataaccgccgaatgcatccgctgataccgcgccaacctgtttgccgcgtaactcatccgcttgagtgataggactgtcctgacggactaaaatcacgctgccaatcacgttgcggctggcgttgttcggctcatggctggatcgcagtgaaaccagccagcgtagcggatagtggctatctatttgcacgtactgcgctggattggtgagcagaaaatccacgcgcccatgttgcacggcggttttcatcgccgtgagatccaatggcaacaagcgaaaatgctgatcgggcaagccttgattgaggctatcagccagcggctgccagcgttgcagcgtttgggcattgccgcgtaatgccagtacgccaatcgtccattctttgctgtatgccgtcagcgaaacaccgtaacacagcaagataatcaacaggtttcgcaacgtgtcttctcctttttatgacccagatcgccccggtgaattgtcctggatcaagtccctaaagggaatgtggaaaaccacaatagggcttctgtttggcaatttctacactcctcaccatcaactcgtcacatcttcctatcaattaaccgacggcgggtttggagaacaccatggatcgagggaaaagagagtttctacagcgattgggcgtgctaaccgccggcgcagctttggttccgctggctgaagccggttggaaactggaaccgagccgtcgcaacggcaacccccagcgtcgctatgccatgctgatcgatctgcgtcgctgtatcggctgtcaggcctgtaccgtcagttgtgccattgaaaatcagtcaccgcaaggccagtttcgcaccagcgttaaccagtatcagatcgcgctagaaggcgagggcagcgtaaccaacgtgctgctgcctcgattatgcaatcactgtgataacccgccctgcgtaccggtgtgtccggtacaggcaacctatcagcggcaggatggcattgtggtcatcgataacacgcgctgcgtaggctgcgcctactgtgtgcaggcctgtccttatgaggcgcggtttatcaatcacaccactcaaacggcggataaatgcactttctgcgtacaccgtctggaggccggtttattgccagcctgcgtggaatcctgtgtcggcggggcgcgtattatcggcgacttgcacgatgaaaacagtgaactgcgccggatgctcaaacagtatgagggcgaaattaaggtgctgaaaccggagcaaggtacgcagccacaggtgttttacctcggtttaaatgaagtgtttactcggccgctacaggggcaaccggcgctgtggcaggaggttcacccatgattcgtgaaattctggtgcgtccgcaggaaatcagttggttaccttgggcagtgcaatattttttctttatcgggctggcctgtggtgcagtgttactcggctgttggcaacgctggttcaggcgagataaagggccacagctagaacgagcggcgctgatgttggctaccgcggcggctattgtggcaccgttggctttgagcgcggatttacatcagccagcgcgcgcctggcatttttacccttattttacgccctggtcgtggatgtcatggggttcgctgttcttgccgctgtttagcgggctggtggtgacctattttctggtcttaatctacggccaacgggtaaaccggcctttgactggattactgcggctgttatcgattctgacggcgttatcggcactttcgattctgatgtataccgggcgggaagtgtcggtgctacgcgctcagccgctgtggttcaccctgtggctgccgctgtttattttcctgacggcgatgcaggcggtgccttcgttgctggctttgtggctgtggcgtcagccgcaggttcagaggtatctggcgcgttggcaactggtttctctactgcttttggccttggtgacgttgctatgggccggcggcgcgacgctttctgctgcggcgttacgtctgtgggccagcgggcacccgttaaccgcggctgcgccattattgattggattgatgttattgggaatggcattgctgaatctgaaacgttgcttacctatcggtgtggttatcctgcaaagcctgctggcgatggtgatgtgctggatggtgcgttggctattgctgatgcaaagccaaaccttgcctaaatataacgtgctcgcgaacccttatcagttatcgccgggtaccgacggattgctggcgatcatcggtacgttcggtttatgggtgacattaattattgcgctccgtgaaggagtcagatggtgggaagggagagtgcaacatggctaaaacgacgcggcggcaatggttaaaaggcggtttggctctggggggattagtggcctttggcgcaggttatcacgatgtggtgcgtaaaacgctaattgggctgcgggacggcagcgccggaaagttgacgcgagaccccattaacggcaactcactcacgccggaaggccatgccgggcaagaatggcaggctacgccgcatcaggcggtttcgatgacacaatgttttggctgctggacgctgtgtgggctacgagtgcgagtggatacgccgcaaaatcgcattttgcgaatcgcaggcaacccctatcacccgttgtctcacgaccaccattttccctacggattaccggtgagcgaagctttgcgccgcatgggcggtgagcaagggttggcggacagatctaccgcatgtgctcgaggcgcgacgctactggaaggcgtgaccagcccttatcgcgttcttgagccgatgaaacgagtgggggcgcgtggtgaaggtcagtggcaacgtatcagtttcgaacagttagtgaaagaagtgacggaaggcggcgatctgtttggggaaggccatgtcgacggcctgcgggcgattcgcgatctggatacgccaatcgatccggctcagccgtccttggggccgaaggccaaccagttgctgatgaccaacgccggtgacgacgggcgggacgcgtttatccaacgctttgctgccaaagcctttggtactaaaaatcttggtagccacggcgcttactgcgggctggcttatcgcgccggttctggggcattaatgggggatttggataaaaatgcacacgtaaaaccggattgggataatgtgcgttttgctctgtttttaggaacctctccggcgcaatcgggcaacccgtttaaacggcaaggcagacaattagccaatgcgcgccaacgggacgattttaattacgtggtggtggctcccgcgttgccgctgacgaccacgctggcaaatcagcataaccgttgggtgcccgtgctgccgggcagtgattcggcgctggtgatgggaatgattcgctggattctcgaacaggaacgttttaacgcgccatatctgaaagtaccgggagaggcggctatgactgccgccggagagcgcagttggactaacgctacccatttggtgattgttagcccgcaacaccctctggccggtcagtttctgcgggcggcgcatttgagcggtgaaatccttgcggaaggggaagaaagcccggtactggtggcgcagggcgatggggctttggtggcggcaccggttgcgatggacgcggagctatatgtcagtcagagcgttacgttggcggacgggcagcaggttgacgtgcaatcggggctgagcctgctgcgtgcggcggctaatcgttttacgctggaggaatacagccagcagtgcggtgttccggtggcgaccatcagcgggttggcgaaagaattcaccgcctatcagcgtcaggcggcggtgatttcccacggtggaatgatgagcggcaacggtttttataccacttgggcggttatgatgctgaacgcgctgattggtaacctgaatctgaaaggcggtgtttccgtcggcggaggcaaatttgacggctttgctgatggcccgcgctaccaactggccagtttccccgggcaggttaaatctcgcggtttgtcactatcccgcagtaaacagccttacgaaaaatctgaggaatatcaacaaaaactggctgccggtgaaccgccgtatcctgcaaaagggccgtggtacccctttgtcggcgggcagttaaccgagcaattggctccggcgctttctggctatccttacccgctaaaagcctggatcagccatatgaccaatccgttgtacggtgtcgctggtttacgtggtctggttgaagataagttgaaagatcctaaacatttacccctgtttattgccatcgatgcttttatcaatgaaaccactgcgctggctgattatatcgtgccagatacacataatttcgaaagctgggggtttagcgcgccttgggctggcgtattggttaaagccagcactgcccgctggccggtggtggagtcacgcacggcgcgcactgccgacggacaagcggtggcgatggagagtttcctgatcgccgttgcgaaagcgctggctttacccggttttggtgaaaatgcgatgcaggacgtacagggcaaggggttaccgctcgatcgtgccgaagatttttatctgcgcgccgcagccaatatcgcctatctgggtgaaaaccccgtgcccgcagcgcaactggacgaattacaactcaccggcgtggtacgtttactgccggaaattcagcgcagtttgtatccggatgagcaaatgcgggttgcgtatttactggcgcgaggcgggcgttttgcgccgtatgaaaaatcgtggaacggcgacgctactgggccgcagtggaagaaaccgctacatatctggaatgaaaatgtggctaaacatcgtcatgccatgaccggagagcgttattcgggttgcccgactttctatccgccgcggctggccgatggctccagtattcaccagcattatcccgtgcagagttggccattccagttgatgtcgtttaaatcacatttgatgagcagctctacgccgatgattgagcgtctgcgggcagtcaaagccagtaatctggtggcgattaatccgcaggatgccaaagcgctgggcgtggcgcacggcgattgggtcaaactggaaacccccggcggcagcatgaaagcgcagctcagtgtattagatggagtgatgccaggagttattgcaattgagcacggttatggtcatcgcgaaatgggtgcgaatctgcatcagcttgacggcgtggaaatggcgagtgacagccgaatcggcgcaggcgttaatcttaatgacctcggatttatcgatcctacccgagaagtgccaaatacctggctggattgggtgagcggcgcggcggtgcggcaagggcttccggctaaactgacgcgcttagcctgatatcagtttgttgctttgcgtgcggaaccccttccggaaagaaggggtttttctttttatagcgtattatatatgcagctaattaatcgccataaatgggatagacaacggatgatgcgagcagaaaaagtcagcgtcgggttattgttcggtggcgtcctgctcggttatgcaggtgcacactggcaacacaattttttactggtattggccggagcctcattgctggctggcattatagcctctggtttcaccgattgtcgtcgctgcaaaaagccttaactccgtgccgtagacgacgatcggcgctgtccgataaaaggcgctacgctgtggatgatcatcccgataatgaccagcccaattcccgccagtgataaactggtgggtaatggagccgccagccagaccatttccccaagcaaagcgaagagcacttctccagattgagtggcttccaccgctgctaaacgggaataatcctgtttgaccagattggttgcggcaaagaacagcaaagtggcaatcacgccggagaacaacgccaccagcagggattgctcgacctgcccctgagagggccagccgacctgatacaccccaacggcagacagcagaatccagaatggtagactggccagcgtcatatttagcacccgctggagggtatttacctcaccctgacaaatagccatcatcttgcgattgcctaacggatacataaaagcagccaatgttaccggcaacaaacaccacagcgtttgttgcaagttcaacgattgagcgtgctgccactgcattaacccaacgccgatcaaaatcaacagcgaccagcgcaatcctttgaaggggattttaccgcgacgcgtctgtaacccctgttccgtggcgatttgctgtttaaacagcgggatcagcagtgagcctgcaataatggtaatttgccaggaaccggccaccagccagccttcgccataagatcccgccagactcagcggcgcgtaaaacaggccaaacccaacggtgctccacagcagatagcctgaccagtattggcgcaaatggctcagactttgccgcagttgcccacgcatcattaccagcaaccacagcatgggagccataaaaataaaccgcagcgcggcactccagatccagctgccgccggataaatccatggctcgattaagaataaaagtaaaagcgaaaaagaatgacgcggcgaggccataaaatatagcgcgcatgattttcctttttaaagcagtcgccaaaatccctgagtaaaatctgataatgaacagaatagagtcgcgggagtcgatagccatcaggcggaaagcggaacaataaaacaggaatacagatctacgtcgctaacgtcaagtctctgccaattaaccggcccctaaagatgtgaccgcgctcagtttcgggtatgatgtgcgccgcgcgggtaaatgctcgccgcaaccgcagtttcgctgcataaaaatctctcagaaacctcttcgaaagacaggaaagtacaccatgccagtgttacataaccgaatttctaatgaggaacttaaagcacggatgttggccgaaaccgaaccccgtaccacagtttctttttataaatacttcaatctggatgacgccaaagcattccgtgacagcctttacagccaatttgtgaaattgggcgtatttggccgggtttacgtggcgaaagaaggtatcaatgcgcaaatcagcgttcccgccaaccgttatgatgagtttaaagcggttttattcgcttctcatccggcgttggatcaggttcgcctgaacgtagctctggaagacgacggaaaatccttctgggtgctgcgaatgaaagtgcgtgagcgcattgttgccgacggtattgatgacgacagctttaatccggcaaacgtcggccagtatctgaaggccgatcaggttaatcagatgattgacgatccggatacattgttcgttgatatgcgtaaccactatgaatatgaagtggggcattttgaaaacgcgattgaagttccgtccgatactttccgggaacagctgccgatggcagtagaaatgctacagcaagacaaagacaaaaatatcgtcatgtattgcaccggcggtattcgctgtgaaaaagccagcgcctacatgttgcataacggcttcaaaaatatttatcacgttgaaggaggcatcattgagtacgcccgcaaagccaaggaacagggtttaccgctgaaattcgtcggtaaaaactttgtctttgacgagcgcatgggcgagcggatttcggacgatgtgattgcgaactgtcatcagtgcggcacgccttgcgatgctcataccaactgtaaaaatgacggttgccatctgctgtttattcaatgtccaagctgcgctgccaaatttgacggctgctgtagccagatttgtcaggacgaattgaaacttccccgtgaagagcagcgcgcccgtcgtgctggccgcgaaaacggtgtgaagattttcaataaatcaaaaggattactgcaaaccactatgcatattcctgcgcctgaaaaatctgacgactaaagctaagcttaaagggttagtttctgcctcaaccctctggctatattcggaaaattaagtttaagttgagggatcgctctgttattttcgatctctcactatttctatcatcgttctcgatgacgacctcgatgcaaggacagattatggtaacgtcggcagtcagcaataaaggtttacgtattgtcgccatgttggccatgctggtagtgattatggccggaatcaaggcggcgtcgcccatcgtggtacctttccttttggcggtatttctctccattgtattgaatccattggtgagtttgctgcaaaaaatcaaaatcccccgcacactggcaattgtactgttggtggtggttattattttgctgatgtcattcctgttaggaatgctcggtaattctttaaatgagtttgcccgctcattaccgcaatatcgcggcatgatgctggaaaaaattcgcgatctacacggttttgccgtgcgtttcaatattgatatgtccgtggatgacgtaatgaagttcgtcgatcctggcgcggccatgaatttcgtcactcgctcgattagccatctttccggcgcgatgaccggtattttcctgctgttgatgacggtggtgtttatgctgtttgaagttgagcgcctgccgtacaaattgcaattaatgttcgacgatccggtaaaaggcattgctatcttgcagcgtgcggtaaagggcgtcactcactatctggtgattaaaacgattatcagccttgctacggggctggtggtttggatattcctggcatcaatgaatgttcgctttgcttttatctggggtttgctggcattcgtactcaattacatacccaatatcggctcggtgctggctgctatcccaccgattattcaggctttattgtttaatggctttgccgacgcgctggcggttactggcggctttattctgataaacctgattggtggcaacatcatcgatccgcgcatgatgggccgtggactaggactttctacgctggtggtgtttctgtcattgatattttggggatggttactcgggccgatagggatgctgctgtcggtgccgttgacgatcatcgctaaaattgcgttggagctgacgccaaccggccataaatttgccgtattgctgggggatggtaaaccggcaacagatgaaaaagagtcgtagagttaggccatagcagtgcgatgcggcatcaatgtatgcctcatcgcgcattttcagcaacaaatacgcaaagataatgattcggaaagcgggatagaccgtcgttgggaacgacgttaagcgtagaaaaagaagtagatatccagcgccaataaaattagccataggcaaatgtagaacactaaatgtgcgcgtacgttgttgatcaacatcgaaaataatttattgaacatggatgccaacgggctgctgagctttgtgattattatagttatatttattattaaaacaataagttactactaagccctcaacggatattgtccaatagagtttctcttttacggtatttatcattaaaaataaagggtattactttctaaaaataaggaaggtagcaggtaaatccgaaactctgactcaataacgataacaattagtgttagggggaaagctgacatgcaatataagaatagttaattaattaaagttatcttcagtgagatccccattgtagattccggctatatattctccatgatatcgagcgtggttaatattagccggatttttaattttactagtaagatattgctgccattaattttatccttaaagatacggttaaccagtatcttcggaggcattattgatggaaataaagcttaccaagaaatgtgtagctaaagaggcgctgaccgatggagaaaacagtgagccatcttcaatacaaatatttaaaaacgttatagataaagcatagctccagacgattcctaacttttattttttcggtgatatgtcttttatgcgaatatacggtgctatcactgatatttagcttttttgctatgcgataatttggcatttctgtcatccagtaacacatcactttatgttcttgcggactaaataaggacgaatgcgttgtcccttgctgccagccttcctgactaccagcatcctgcaagtgtgtcagtgagtgcaataaatcgggtaagcgccgcttggctaatattgatacagtctccgttaaaggtattggtgtttcgctaaagggataagatgcatccagataaatatagactctggcgcgtgtacagcgggtaataaattcctccagcaatggacaatgtccgccgtagcgacaatattgggttaaattgaccattattaccgcaggatcgaaactctgaattaccagcgttgcttgctcaacagttgctacatccattaaatttacagatgacatgctatttaagtatttatttacaccagagcgagtgtaataacattcgtcgatgattaatattctcatggtgttacatccttgtcatacgggcaaccatacccggccgcaaacgcgaataagttaatcctcaggtagctttagcgtcaattcgggattcgcgatgctaatagacggcatttacgaatggataattataaataagcaggaaatagcagaaatagcagtgggataatcgaagatgaacagaataataaaaaaatgcaggagattctaaaactatcagaatatcctgcgataaatagcccgattacgctaagacgatcagttaaatcgactcaaagaaaaaggtttaatatcaataggagacgccttatcttgcgcaaacagcgcggcgatttcgcccagagcagtcgcgaacttaaaaccgtggccacttagcccgctaaataccataattctttgactttctggcagcgtatcgataataaaatcttcatcaggactcatatcgtaagtgcaggatgaaccccttaaacacacgccaacgccgggcaaatagttgcgtaaaaagctgaaaacttcggttccatcctcggcaaaaccgccaaaaggcttgcgttgatccgcagattcaatgagttgaccgccgttatgtttaccgattttcagttcttccttcttcgacgggaaaccatagtaatggacgttatctggagtttctacggtgaaggcggggaagtgattttcttcgctgtaacgtccgtctgcgtgatgccaggcaaagactttacgcacggcggaaatggggagcgtaggaagtaattttttcacccaggtgccagcggtgaccaccactttcttaccgcggtaggtaccatcgatagtcaccacatccacgccattatcgtcagggtgaatagccgaaaccggacagttgaatagaatcccgcagccagcggcggtgacttctttaatcagggtggagacggccaaatcagattgcagatagcctgatttcggctcaaatacgccgatatagtcgtcaggaacggtgaaaagcggccatttttgcctcacttcgctcccgttcatgacctgaatcggcaaatcgtacttgcgggcactttcctgtacgtttttcaggaattcggagtcttgcgggcccaggttaatcacgccgctggcatgaaacagctccgcgccagtcgctgtggacaggccatcccacaaggtttgcgcacgaagaatcagtggcacatatttttccccttcgccataagcatgacgaatcaggcgagtgtcgccgtggtgactgccggattgatgtggcggcataccgctgtcgatcatcagaacctttaatccagcctgcgccgcgtaataacccgcagctgagccaacggaaccgctgccaaccacaatcaaatcatattccatgctctgggactccaggaaatagcgtatatgcctgataaaccttcaggccatcgtataaaggcaggctacgcaaaagtaataattatgtgtattagtaataacatgagtagaagactatctaaaggggcgaaacgagcgtgagggcgggagtggcgaataaaaaggcacctgatgaagactcatcggtgccctggggtttagctttgaaataactagtgttttcggtggtcaatgtctacataatccgttgattcgatcttagcaatgcctgcttctagaatattaattaattggcgtgctacatcggtggtcagccagagcgttctatcgactaaggcgttctctgtgggttgatccacggaagacaggtaatgaagacgaatcatcatggcattgtacgcgtctacagtgctgatatcccagcctacgagcgggtgagtctgaataacttcatcatttctgtccatatagaccccttattaagtagtaactaattgaagtaactaatgaggatcattcggctcataattgagtgagctttttcagtatacgcaactagatatttatttggcgaataacacaacatctttacaaatttgtttaataacgctgagaaaatgcacaataacgcgattcagcttcaatatgggcatagaaagaaagaggacaaggggctgagaaaaaataatcagagaacatgatgtgaggacaaaaaagccgaggagcgactccccggcaaaaactgcataacagtgagttattctgcgtcaaaccaatcgtcggcgctttcccaaatttcttgcaatatttcagagatccgatctttatcggttttggctccgccaagtaccgaaagatcgttagctccggcataacgaatcctgacggtcgtatccgggaattgagcattgagccttttagtgagctccccggttaaggcttcaatcgcgcccgcgggtaatgggttttttctatcaatgctgacttcaacacgcatgtttcatcctccgaatattgatactgtatgtttatacagttaaatgtaatgtgcgacaagagggagaatgaaaaaaatgagaaaaataagggaagagaataacgcttccccttgaaagacattagctttttactgaccaattcagcgtttggcctgccagataaggcacaatagattcgttaccaagcgaaatttcttccggctgggtgaagggctggcgcaccaactcaacaaaatcttcattgactggcaaaccgtagaaacgcggcccgttcaatgaacagaaggcttcaagatgttgtaaagcctccatttcttcaaacacggtagcgtaggacggtaaggccgacggcgcattgaatacgcccgcgcagccacaggaagactctttgcggtgtttggcatgcggcgctgagtcggtacccaggaagaaacgctcgctgccgctggcaacggcttgacgcagagcctgctggtgggtgccacgtttcaggattggcaaacagaacaggtgagggcgaataccgccaactaacatgtggttacggttaaacattaaatgctgtggcgtgatggtcgcggcaataaaatcattacctgcaagcacataatcagccgcatctttggtggtgatatgctcgaaaacgattttcagcgcagggaatttttggcggataggctccagaatctgatcgataaagcgggcttcccgatcgaagatatcgacatcggcatcggttacttccccgtgaatcaatagcggcatacctaatttctgcatctgctcgaacagcggataaatccctaaaatatcggacacaccgtgggttgagttcgtagtggcattggcagggtaaagtttggccgcggtgaatacgccttgctcgaaacctgcggtcaactctctttcggtcaactggttggtcagataacaagtcatcagcggagtgaatgtctggcctttaggcaccgccgccaaaatacgttcccgataagcaatggcgctgctaacggtggtaatgggagtggccagatttggcatcactatcgcccggccaaatacctcactggtataagggagtaccctggctaacatttcgtcgtcacgcaagtggatgtgccaatcgtccgggcggcgaattttcagggtttgggattgtgcagtcatttggctagctccactttgatgatgagaatttcgaggttttttgctggtacgggagtgtttccggcggggtgtaaggataagcggaaagtgcgacagatgcatctgattgttcgggttaagttgaaaacaattagaaaaaggcatcttatatagacaggtattgcgtcagtgaattcgatgcaataaacagctatcggtcgtcaggccgacagaagattgaaacaggagagggtaaaatggaagttcgcgtcatcgccagcttagtggcgaaaccagagtttattgaagatgttaaggctattgtgcatcaaattattgagccaagtcgtgccgaaggcggcaatctgcaatacgatcttcatgcggaaatcggtcagccgggtacctttgtgttctttgagcgttgggcctccgatgatgcgctgcaaaagcacaataaaaccgctcatttccaggcatttgtcggccagttagacggcaaattggataatctggatatcaaaacgctgaaacagattgcctgattgactcggtttaatgctcagaaattacggttttcagtcgtaaaaaaacccgccgtgtggcgggttttgtcgttaaggagctcgctgtcagttacttgactggctgaggcttggtagccggtgccgtagccttgttcactgccgcgtgcgcgcccgcagagcctttacctgcaaagtcgaacgcagggcgttgccattcactgtgagctgacgcttgcgtagcctgagttgaggcagaagccggtgctttggtcatcggagcgaatgcatgatgtttgaagcgcacgccttccggatgaacaaccgcttcggtcactacggtagcggccacttcaacggttttcggtgcatcaactactggcgtttccggcgctgcttgcgtcgcagtcacttcagcaacaacggtttcagccacattctcttctaccacagcttttgttgttggcgcggtttcttcaactgcgtcagttgcgctgacaatggtttcggtatgagcttcaaacggtgcttcaacagccagggtttcggcaacaacgtcttctatagtgaccgctttcgctgcgatttcttcaaccgcaggttgagccgtcacttctggctgaacaaccgcttgcgctgctggctggttaaccggagtttcagctttcgtcgtttcaacgccagcagtttccatttcaacagttttaacttcagcagtttcaactgcaacagttttgactacaggcgcctcaacgactggagcagcaactggcgcgcggcccggtacggcagcagctgatgaagatgaaccacctggctgatgtttgtaagccgcaggcgctggcgtgaacgcttcaaccggtttttcagctttaggcgcttcaatcacagcaggttcagcgacaacggctggtaccgccacggtttgttcaatcgctggcgatgcagcaaccgaattcgcctgaccggtggtgactgccggtgctgcgatcacagcaggtgtttcagccgcttgggtattcaggttttctgcgatattttccgctgctggctcagcaacttgctgttcctgcggcagtgcaaccggataacgaataaacaccttgcctgacgccatttccggagaggcaaacgccccggccagaggcatagcggattgggttggataacgctcgtcacgatagcgacgacgacgttgaccactgacacgcaggtgacgtggtgaacggcgtgaacgacgtggcataccattctcgttattggcagaacgatcgttaccgttgtcttcatccgctgctggtgctaacagtttcacttcttcctgtgcaacaaccggagccgcggtttgctcggcgattttaacaacaggagtcttttcactggcggtatccgctgggttcagttcatcattggccgattgaatacgtactttttgattcaattgacgacgctgacgacgctgcatcacctgttggcgttcttcctgctcaggctggacttcttctaccagatttaccgctacaacgctttcaaccacttcagccgctttcacttcctgcggattctgacgttgacgacgttgacgatcgccacgttcacgacgcggttgctgttcttcccgtggcgctttgtcgttgtcgcgattttctaccgtagcttcaaccgcggtattttgctggttagaacgacggttacgacgctgatcttcacggccttcacggccttcacggatgtcacgattatcgcggtttgcatcccgattgccgttgtcacgcgcgttttcacgcgtattttcgcgaccttcacgcggcgtgcggtcaccgcgatctttgcggccattgttctgacggcgcggattacgacgatcttgacgacgattatcggtattttcggttttttcgacgacagccggtttcacttccgcttcagctggtgcggcgaacaggcttttcagaccgctaatcaagcgactaaacagacccggctgtgcggcactgacggctgcttttgctggctgcaccgcaggtttggccgctgccgcaggttcagcttccggtggcacttccgttggcagagagaaggtcgccagcgccggttgttccggacgtttgcgttccattggcgcttcttccagtggctgagccatctcttcttcatgcagtttcggcagcaggtagctcagggtcggaacttcttcacctttacgtacgcgcagcaccgagtaatgcggggtttgcatctggtcgttaggtacgataactgcacgcacgccgccttgacgcttctcaatggcattaaccgattcacgtttttcattcagcagataagaggcaatctggactggaacgatagcgtgaacttcatgggtattctctttcagcgcttcttcttcaatcagacgaagaatcgacagcgacagagattcattgtcacgcacggtgccggtgccgctgcaacgcgggcagacgtggtggctggattcacccagtgacgggctaaggcgctgacgggacatttccagcagaccgaagcgagaaatccggccgatctgaatacgggcgcggtcttgacgaacggcgtcacgcagacggttttctacttcacgctgatggcgaaccggcgtcatatcgataaagtcgataacgattaggccgccgaggtcacgcagacgcaattggcgagcgatttcgtccgccgcttccaggttggtattgaaagccgtttcttcgatgtcgccgccgcgagtagcgcgtgcggagttgatatcaatcgcggtcaacgcttcggtggtatcgataacgatagaaccgccggaaggcaaacgcacttcgcgctggaacgcagattcaatctgagattcaatctgatagtggctgaacaacgggatttcgccgctgtacaatttgattttgctgctgaaatccgggcgacccagagcggcaatatgctctttggccagatcgagaatttttggattgtcgatcaggatttcgccgatgtccgggcgcaggtaatcgcggaaggcacgcacgataacgttgctttcctgatgaatcaggaacggagcagggcggccttcggcggcttttttaatcgcatcccagtgtttcaggcggaatgacaagtcccattgcagcgcgtcggcagatttgcctacgccagccgtacggacaatcagccccatgccgtcaggcaactggagtgaagacagggcttcttttagttcagtacggtcgtcaccttcgatgcggcgagaaatgccaccggcacgcgggttattaggcatcagaactaaatagctgccagcgagactgataaatgtggttaaggctgcgcctttattaccacgttcttctttatcaacctgaacaataacttcctggccttcgcgcaatacatctttgatgtttggacggccatgagaggaataattacttgggaagtactcgcgagagatttcttttaaaggaaggaaaccatgtctttctgcaccgtaatcaacaaaagcagcttccagacttggctcaattcgggtgattttacctttgtaaatattcgcttttttttgctcatggcccggactttcaatatccagatcataaagccgctgtccatctacaagggcaacacgcaactcttcctgctgagttgcgttaatcaacattcttttcatcttaacttactcgttatttttacattggcgttagaactgcgggcaaaataacctcatggccggataaaccgatgaccccgagtcttctagcaaagccgtcaacctcacggttgtcgcctgcataggggcgcattatctcggtaagcctgtgtttctttctgaaaaacagcgcttttagtagagggcagcttctgaatttatgacaacagatctgatcccatttgccggccaagctgcaacccgcagcccgctaattgcttgatttcacattacgtcttacgccattgctgcgtttttgtgcgatcaggcaaacttattattccacaagttccttgatctaacgagaatcaacgcggaattaactgcattattccattgctgatactgatatagcaaggtgactttagctgtctaagtaaagattattttactgtgttcacagtgttggcgagtattgatgtgttattaaacaaaaataatgcgcaaacgttctcttcaatagccagactcacagttaagcacataaaaaggggtggcgctaattcctctgtataattagaatcgcgcaccatgaaaacagataatccagtagtacaattaatcaccatttctgccgacgaagccggtcagcggatcgataactttttgctcgctaaattaaaaggcgtgccaaagagcatgatctaccgcatcgtgcgtaagggtgaagttcgcgtcaataaaggacgcattaaaccagaatataagctggcggacggcgatgtggtgcgtgtaccgccggtgcgcgtggccgagcgtgaagacgcacccgtttcggcaaaactggataaagtcgcggcgttggccgactgtatcctgtttgaggacgattacctgctggtgctgaataaaccttcgggaaccgcggtacacggcggaagtggtctgagttttggcgtaattgaagcgctgagagcgttgcgtccggaagcgcgtttcctcgaattggtgcatcgtcttgaccgcgacacttccggcgttctgttggtagcgaaaaaacgttcggcgctgcgctccctacatgaacagctgcggctgaaaggtatgcaaaaagactatctggcgctagttcgcggccaatggcaatctcattgcaaggcggttcaggcaccgttgctgaaaaatattatgcagagcggcgagcgagtcgtgaaggtgagcagcgaaggcaaaccgtcggaaacccgctttaaagtggaagagcgctttgaacactgcacgttggtaaaagctagcccgattactggccgaactcaccagatacgcgttcacgcattgcatgccggccatccgatcgcttttgatgaccgttacggtgaccgtgatttcgatgcgcaacttaaaggcactggcttacatcgcctgttcctgcatgcggcagctttacggtttgagcatccgaataccggcgaaaccatgcggctggaagcgccgttggataatcagttacgccactgcctgttaatgctgcggaaaaacttcccggcaaaataatcgtgctgtcagcttcgaatagcatcggtaaggcgcaaaagtgcgccttactttgttatatcactctttttattgtcttattattagcgcttatctgcgctgttctgacttaacaacgcattcaccccttgttccatcagcatctcattaagcgcaatcagcggcagaccaatcaaggtattgggatcgcgaccttctaaacggtcgaacagacttattcccaatccctcacttttaaagctaccagcacaattccaaggctgttctatgcttaagtagccgtttatttcgtcatcgcttagcgttctgaaatacacctgaaaagtttcgcactggatatttatatgaccgctagcggaattgagcagcgtcaaaccggtataaaaagtgacacattggccgctggcctggcgtaattgtttaaacgcattctcatgattgtgcggtttgccggttattttcccgttcagcacgcacacctgatcagagccgataatcaaatgctgcggatagtgttcagccaacgcagtagccttggcgctcgccagtctctgcactaaggttggagcgtcttcctgcggcaacgggctttcatcgatatctggcgctgcggtaataaagggcaattgaagtttttccagcaatgctttgcgataagaagaagttgaagccaaaactaactgagacataatattttccataaaccgtggcgtaatttaatcagtcattttaaactgtccgccgctgaggaagcgaatattggtgaaaggtgcggttgaatggcctttttctttgactctatgtcgttacaaagttaatatgcgcgccctatgcaaaaagtaaaattacccctgaccattgatgcggttcgtactgcccagaagcgattagattacgcaggtatctattcccctgagcaagtgacacgcgttgccgaatccgtggttagtgtggacagcgatgtcgtggcctccttatcgtttaatatcgataatcagcgcctggcggttatcacaggtcatgcggacgtcgacgttacgttgatgtgccagcgctgcggtggcaccttcgcacaccatgtccacacaacatattgttttagcccgatcgtcaatgacgagcaggctgaagcattaccggaagcgtacgaaccgatcgaagtcgacgattttggcgaagttgatctgttggcaatgattgaagacgaaattattctttcgctgccggtcgttccggtacatgaatctgaacactgtgaagtgtccgaggcggacatggtatttggtaaactgcctgcagaggtggagaaaccgaatccatttgccgtattagccagtttaaagaaaagtaattaaggagtaaggtcaatggccgtacaacagaacaaaccaactcgttccaaacgtggcatgcgtcgttcacacgatgctctgaccactgccactctgtctgtggacaaaacttccggtgaaactcacctgcgtcaccacatcacagccgacggtttctaccgcggccgcaaggttatcggctgagtagtacttgctaatctttagcaaggcgataccttgacttgtctaaccctagcgttagatgcaatgggcggggacttcggtccctgcgtcacagtgcctgcttcattgcaggcactggcctttaatccacaacttaagcttctgctggtcggaaaccccgacgccatcactccattacttgcccacaccgatcctttgttgctggaaaggttgcaggtaattcccgctgagcatgttattgccagcgacgctaaaccctcacaagcaattcgcgccagccgtggtacatcgatgcgtatcgcattggatttagttaagaacggtgaggctcaagcctgtgtgagtgccgggaataccggagcgttaatggggttggcaaagttgatgattaagccgttagaagggatagagcgcccggccctgatgacggtgatcccgaaccaacgccgtagtaaaaccgtggtgttggatctgggagcaaatgtggaatgcgacagcaccatgttggtgcaatttgccgtgatgggctcagtcatggccgaagaagtcgtggggattacctccccgcgtgtcgcgctgctaaatattggcgaagaagaaaccaaaggtttagataatatccgcgaagccgccgcagtattaaaaaatacaccggcgataaattatattggttatctggaaggcaatgacttgctgaccgggaaaaccgacgtaatggtttgtgacggcttcgtgggtaacgtcacccttaagaccatggaaggcgtgataagaatgttcttgtcgttgcttaaatcatcgggcgagaacaataaacagtcctggtggcttaaactactggggcgttggctgcaaaaacgcgtggccaagcggttcgggcatctgaaccccgaccagtataatggcgcatgtctgttaggattacggggcatcgtaatcaagagccacggcgctgcgaaccaacgtgcgtttgcagttgcaatagaacaggctgtgcaggcggtgcagcggcaggttcctgaaaggatcgccgcgcgccttgaagctgtattacccaagagtgactgaacgtacatgtatacaaagattctcggcacggggagctatctgcccgtacaagtgcgcagcaatgctgatttagaaaaaatggtggaaaccagcgacgagtggatcgtgactcgcaccggtattcgtgaacgtcgtattgcagcaccggatgaaaatgtggccacaatggctttccgtgcggcagagaacgcgctggaaatggctggcgtcagtaaagacgatgttgggctgattattgtcgccaccacctcttcaagtcacgctttcccaagctctgcctgtcaggtgcagcagatgttaggaatcaaagacgccgcggcgtttgatttggctgctgcctgcgctggttttacctatgcgctgagcgtggccgatcagtacgtgaaaagtggcgcagtgcgtcatgcgctggtgattggctccgacgtattgtctcgcgcgttggatccggaagatcgcggcacgattattctgtttggcgatggcgctggtgctgtgttgctgggtgcgtctgaagagccgggtattatgtcaacgcacttacatgcggacggcacctatggcgggttattgactctgccttaccagaatcgcgaaacccaggatcagcctgcttacgtcaccatggcaggtaatgaagtgtttaaagtggccgtgaccgaattggcgcacattgtcgatgaaacgttacaggctaacggcttggatcgttcagaactggactggctggttccgcatcaggcaaatttacgcattatcagcgctacggcgaaaaaattaggtatggggttggataaagtggtgatcactctcgatcgtcacggtaatacctctgccgcatcagtgccttcagctttagacgaagcggtacgtgatggccggattcaacgcggtcaattagtcctgctggaagcgtttggtggcggcttcacttggggctctgcgctggttcgtttttgatttaacagaaagtcttttgatttaatagaaagtcttttgatttcacaggaaggcaagatgtcgaaatttgcaatggtttttccaggtcaagggtctcagaccgtgggtatgctggctgatttagctacacaattcccgatagttgaagaaactttcaccgaagcctcttcggttttaggctacgatttgtggcagttggtgcagcagggtccggcagaagaactgaacaaaacctggcagactcagcctgcgttgctcaccgcttcggtagccatctggcgtgtttggcagcagcagggcggaaaagcgcctgcgatgatggcaggccatagcctgggtgaatactcagcattggtatgtgctggcgttctggatttcaaacaggcggttaagctggttgaattacgcggccaactgatgcaagaagcggtacctgaaggtactggcgctatgtctgctattattggcctggataatgaatctattgccaaagcttgcgaagaatcggcacaaggtcaggtggtttcaccggttaactttaactcgccggggcaggttgtgatcgccgggaacaaagaagcggtagaacgtgccggtgcggcctgtaaagcggctggcgccaagcgtgcactgcctttgccggttagcgtgccttcccactgcgcattaatgaaacccgcggcggataaaatggccgttgctctggaagacattgaattccgggcaccgttgttccctgtggtgaataacgtagacgtaaaagccgaagtgtcacctgaagctatccgtagcgcgctggtacgtcagctatacaatccggtacgttggactggaagcgttgaatttatggcggcagaaggcgttgaactgctgctggaagttggcccaggtaaagttctgactggcctgaccaagcgtatcgtggacactctgtcagcagcaccggtaaacgatgttgcgaccttgaccgcagcgcttgaacaataataaagaggatagcatgagctttgaaggaaaaattgcgctggtaactggcgcaagccgtggcattggccgcgctattgcagaattattggtcgaacgtggtgccgttgtaattggtactgcgaccagtgagaagggggctgaagctatcagcgcctatttgggtgacaagggtaaaggtttaatgttgaacgtcgtggatcccacgtcgatcgacaaggtactggcaactattcgtgctgaatttggcgaagtcgacattttagtgaataatgccggtatcacgcgtgataacctgctgatgcgtatgaaagacgatgagtggcaggatatcctggatacaaatctgacttccgtgttccgtctgtcaaaagcggtaatgcgagctatgatgaaaaagcggtttggccgtatcatcacaattggttctgttgttgggaccatgggcaatgcagggcaggttaactacgcggccgctaaagctggcgttattggttttagcaagtctttggcgcgtgaggttgcttcacgtggcattactgtcaacgtcgtggcacctggctttattgagacggacatgactagggcgttgacagatgatcaacgcgcaggcattttaacccaagtaccagctaaccggcttggggaagctaaagaaatcgccagcgctgttgcatttttagcctctgacgaggccagctacatctctggtgaaacattacatgtcaatggcggcatgtacatggtttaagcactggcagaactttttgcattatttgaggtgaaaaccgcaaaataatgcaaaattgtggttcgaccagccgagatttagttgcatctttttcaacattttataaactacgaaaaccatcgcgaaagcgagttttgataggaaatttaagagtatgagcactatcgaagaacgcgttaagaaaatcatcgttgaacaacttggtgttaaacaggaagaagtactgaacgacgcttctttcgtagaagatcttggcgctgattctcttgacaccgttgagctggtaatggctctggaagaagagtttgataccgagattccagacgaagaagcagaaaaaatcactactgttcaggcagctattgattttatcaacgctagtcagcagtaagcgaacatatctaggcggtcactcgaccgcctaagtttttgtcccaaagtgttattttccctccttggaggacaaacgtgtctaagcgtcgagttgttgtgactggactgggcatgctgtctcctgtcggtaatacagtagaatccacatggaatgctgttcttgctgggcagagtggcatcagcctgatcgaccatttcgatactagcgcctatgcaacccggtttgctggcttagtaagaaattttgactgtgaagaattcatttcgcgcaaagatgcacgaaaaatggatgccttcattcagtacggtattgcggcaggtattcaggcgatgcaagactccggtcttgaagtgactgacgctaacgctgaccgtatcggtgccgctatcggttctggtattggtggcttaggcctgatcgaagaaaaccacaccgcgctggttaacggtgggccacggaaaatcagtccgttcttcgtgccttcaactatcgtgaatatgatcgcaggccacctgaccattaagtttggtttacgtggaccgagtatttctatcgcgactgcctgtacctctggtgtgcacaatatcggccatgccgcccgtatcattgcttataatgatgctgacgtgatggtcgccggtggcgcagaaaaagccagtacgccattgggcgttggcggtttcggtgctgcgcgagccttgtcaacccgtaacgacgatccacaagcggctagccgcccatgggataaagatcgcgacggttttgtattgggcgatggtgccggcatgatggtactggaagaatatgaacacgcgaagaagcgtggcgctaagatctatgcagaagttgtcggttttggtatgagcagcgatgcctaccatatgacctcgccgccggaaaacggttcgggcgcagctttggctatggtgaatgcgttacgtgacgcgggtgtcactacttcgcaaatcggctatatcaacgcgcacggcacttccacgccagcgggtgataaagcggaaacgcaggcggttaaatcggtgtttggcgctgatgcagagaaagtcatggttagctcaaccaaatccatgaccggtcacctgttaggtgctgcgggcgcggtagaatctatctttaccgttctggcactgcgcgatcaagctattccaccgaccattaacttggataacccggatgaaggctgtgatttggatttcgttccgcacaccgcgcgtcaggtttcaggcatggaatacaccctgtgtaactcgttcggcttcggcggcactaacggttcattagttttccgtaaagtgtaacagcgaccgattagtaacacagatgataaaaacccggttatccgggtttttttatagctattgtttgccaatgtaagtgaacagaaaaagataaatccgaaagtagtggaatatccggttgagaaaactttgggatgtaaactcaatgagagcttattaatatgtttgctcactagataaaccaccgaataaataaaagagagttggatatgatgttgataaacggtatggcgcaaaaccagctctctgcaaccgacagaggcttgcagttcggggacggctgttttactacggcgcgagtgcttaatggtgaagtttgctggctgcctatgcatatacaacgcttgcagcaaggcgcggagcgtttactgctgccaactattgactgggcgctattacagcatgaaatgaccgaactggcgtggcaggctcagcagggcgtactgaaagtgattttgacccggggcagcggtgggcggggttacagcggtgaggcctgcgaacagccgacgcgcgtattatcgattagtggttatccggcacattattcattatggcgcgaggagggcatcacgctggcgttaagtccggtagcgttggcgcgtaatccgctgctggcgggggttaagcatcttaaccgtttggagcaggtactgattcgcgcgcatcttgagcagacaacggcggacgaggctctggtgcttgacactgcaggccagctggtggaatgctgtgcggctaatttattctggcgcaaaggcgaggcagtatttacgccggatctcagtcattctggggtggcgggtatcatgcgtcgtcgtattatggcgcgactgtttgcttccagatacgcgttacactgcgtatccgaacccttagagacgctaagagacgcagatgaggtgctgatctgcaacgcgttaatgccgctggtttcggttaatcaagcgcatgaatggacttatagctcgcgagagctgtatgaattcatgcgaccacattgttaatatcgatttaatcgctaatatcaattccaaattttaaagatggccgatagatgaaaagaaaaaacctcagaatactaaccatcctagtggggatctgcttgggtttgctgtttttgggctatcagaaagtgcaaaatttcgccggttccgcgctggaaatcaagcaagacaccatttttaccctgcctgcgggtactggccgagtagggcttgaaactttattactgcaagatcatatcgttgtggatacgactctgtttccgtggttactgcggatcgaaccggaactcgccaatttcaaagccggaacctatcgttttacgccgggtatgacgatacgtcagatgttgaaactgctggccagtggtaaagaagcccagttcagtatccgctttattgaaggctctcgtttgagtgactggatggaaaccttgcagcaggcggattacgtcaaacatgagctggcgggtaagagtaacgctgaaattgctaaactgatcggcctgaaagataccgaacatccggaaggctggctgtatcccgacacctattcttataccgcaggtaccacggatctggctttgctgaaacgggcgcataaagaaatggaaaaagccgttgcccaagtgtgggaagggcgggatagctcgttgccatataaaacgccgaatgatttggtcactatggcttctatcattgagaaagaaaccgcgatcaacgatgaacgaaccaaagtggcttcggtatttatcaatcgcctgcgtatcggcatgcggctgcaaaccgatcctacggtgatttacggtatgggtgataaatatgccggaaatatcacgcgtaaggatttagacaccccaacgccgtataatacctacgtgatcgcgggaatgccgccgacgccgattgccatgccggggctggcatcgttacaggccgcagcacatccggctaaaacgccatatctctactttgtagctgatggtaagggcggacatacctttaccaccaatttagccagtcataaccaggcagtacgcgtttatcgtcaggcgttaaaggataaaaatggacagtaaatttatcgttatcgaaggtctggaaggtgcgggtaaaaccaccgccagagataccgtggttgccacactgcgcgagcagggtattaacgatatcgtgtttacacgcgagccgggcggtacgccgttggccgaaaaattacgcgacctgattaaacaaggtattgatggcgaagtgctaacagataaggccgaagtgctgatgctgtacgccgcgcgggtgcaattagtggaaaacgttattaaaccggcgttggcacgcggtgcctgggtggtaggggatcgtcacgatctttcttcgcaggcttatcagggcggcggtcgcggtattgatagccaactgatgacatcgctgcgcgatacggttttaggcgattttcgcccggatttaacgctgtatctggatttatcgccggcgattggattgcagcgcgctcgccagcgcggggcgttagatcgtattgaacaagaatctttggcgttcttcgagcgcacccgggagcgatatctggcgctggcggcagcagattcaaccattcaaactattgatgcttctcagacactggagaatgtcagcgcggatattcgtcgaacgctgactcagtggttaaacgcgcgggaaagcgcgtaatgaattggtatccgtggttaaacgcaccttaccgccaactggtcgggcaacatatcgccggccgtggccatcacgccctgctgatccatgcgctgccgggcaacggtgccgatgcgctgatttacggattgagccgctggctgatgtgccagaaacgtcagggagagaaaagctgtggcgaatgtcacagttgccgcctgatgctggctggcaatcatccggactggcacgtcctgtcgccggaaaaaggcaaaagcagcattggcgttgaactggttcggaacctgattgataccctttattcccatgctcagcagggtggagcgaaagtggtctggctgcctcaggctgaatccctgaccgatgcggcggccaacgccttactgaaaacgttggaagaaccgccggaaaacacgtatttcctgctgggatgctttgagccttcccgcctgttaccaacgctgcgtagccgctgtttttactggcatctggcttgcccggaaaccgccttgagcatgcagtggctggggcggcaaatcagcgctgagccggtcgccatgctcgcggcgttgcagctgagcgaaggcgcacctattgcggcagagcaactgttgcaaccggcgcagtgggcgcaacgaacggcgctgtgtcaggcgctggtagaggcgttagcccgtcaggatttgttgtcactgttgccgcagttgaatcaggataacgttgccgatcgtgtgtattggctgtcttctttattgctggatgcgttgaaatggcagcagggagcagggaattttatcgtcaatcaggatcagcgcccgttggtgcaacaattggctgagtcagcttctatcgccgtgttgctaaaatcggccaatcaatggctgcactgtcgccatcaattatcttcagtcgtcggcgtgaaccgagagctgttactcactgagcagttgctcaattgggaaaacagactgtctggcgccgatcgtacattttctcattcgttgtaaaagagtttacttattatgttgttagttgattcccattgccatctggacagtttggattatcaggcgctgcacaccagcgtcgatgacgtggtggctaaagccaaagcgcgtgacgtcggttatatgttggcggtggctaccaccttgccgggttttcgtgccatgacggcaatgatcggagaacgtccggaagtggcgttttcctgcggcgtgcatccgttaaatctggaagatggctatgattttgccgaactgcgcgcgttggccgcagcggataatgtcatcgcgatgggagaaaccgggctggattatttctaccagcaggacaatattccgttgcagcaggcgtctttccgtgaacacattcgtattggccgggatctgaataaaccggttattgtgcatacccgagatgctcgcgtagatactctggccattctgaaagaagagcaggcgcaggagtgcggtggggtgctgcattgctttactgaagatatcgcgacggcagaaaccttgttggacctgggtttttatatttccttctccggcatagtcaccttccgtaatgccgagcaattacgcgaagtggctcgttatgtgccgctggatcgtattctggttgaaacagattcaccttatctggcaccggttcctcatcggggcaaagaaaaccagccagcctatgtgcgtgatgtggcggaatacatggcagtgctgaagggcattagtctggaaacgctggccgaggccaccacggctaatttctgtcgactgttccacctggatgatttggcacaatctgccacactcaaatagagcctacgacgataattatttttaagctcgtaattaattccctaagcgagtaatgtttccacccgttttattgtgggtggaaaggtttcactgacgtttctttacaaaaaatagcctttttatactggataaggcatcttcttcaaagaaacgtgactgtcatcaaacattacgcaggctatttattttactcttcgtaataattaaaggggtgctgtagacaccccgattcgcaaaggctttactcccccctttgtaacgccaataaaaagcgagaagcagtaagaaagcactatttactcaggagcactctcaactatgtttaagaacgcatttgcaaacctgcaaaaagtaggtaaatcgctaatgcttccggtatccgtactccctattgcaggtattctgctgggtgtcggttccgcgaattttagctggctaccttcggtagtctctcatgttatggcagaagcgggcggttcagtcttcgccaatatgccgttgatcttcgctattggtgtagctttaggttttaccaataacgacggtgtttccgcattggcggcggttgtagcctacggcatcatggtgaaaaccatggcggttgtggctccgctggtactgcatctgcctcctgaagagattgcagccaagcatttggccgataccggcgtgctgggcgggatcattgcaggtgcgattgcagcctatatgtttaaccgcttctatcgtattaagttgcctgagtatctgggcttcttcgcgggtaaacgtttcgttccgattatctccggcttcacggcgatcttcttgggcgtagcgctgtccttcatctggccaccaatcggtacggcgattcagactttctcccaatgggcagcttaccaaaactctgtagtggccttcggcatctacggcgtagttgagcgttcgctggtacctttcggtctgcatcacatctggaacgttcctttccaaatgcaaattggtgaatacaccaacgcagccggccaggtattccacggtgatatcccacgttatatggccggtgacccgactgcgggtaaactgtccggtggcttcctgtttaaaatgtacggcctgccagcagcggcaattgcgatttggcactcagccaagccggaaaaccgcgctaaagtcggcggtatcatgatttctgcggcattgacctcgttcctgaccggtattaccgagccgatcgagttctccttcatgttcgttgcgccgattctgtacgttatccacgctattctggcgggtctggctttcccaatctgtattctgttgggtatgcgtgacggcaccagcttctcacacggtctgatcgactttgtggtgttgagtggtaacagtagccgcatctggctgttccctctggtaggtatctgctacggtctggtgtactacaccatcttccgcgtgctgattgccaaactggatctgaaaacgccgggtcgcgaagataactctaccgagcaaaacactaaaggcggcactgagatgtcagctgcgctggttcaagccttcggtggcaaagagaacatcaccaatctggacgcctgtatcactcgtctgcgcgtgagcgtggcggatgtatccaaggttgaccaggctggtctgaagaaactgggtgcagcgggcgtagtcgtggccggttccggcgttcaggctatcttcggcaccaaatctgataacctgaaaacggatatggacgaatacattcgtaaccactaattcaggtcggggagtgcaaaaaggaggcttaggcctcctttttttatgggctttacctttgatttcaacgtgtgattctggctgatgtttcttgtggtcagcgggcggtattttccgactctcgccaaggggaggataattcactgagaaaactgggcgattctgcggcacttgcgccggaaattgcttaatgaggttgaaacagatagaaattgtcgctcatactgcatgcactgatttttcccctacgaaggaaatatgttatggccgaagaaacaattttcagtaaaattatccgccgtgaaattccggccgatgtggtttatcaggatgaactggttacggcgtttcgcgatattgcgccacaggctcccacccatattcttattattcctaatatactgatccctacggttaatgatgtcaccgtcgaacatgaagcggcgctggggcgtatgattaccgttgctgcaaaaattgcagaacaggaaggtatctccgaagacggttaccgcttgattatcaactgtaatcgtcacggtggtcaggaggtttatcatatccatatgcacctggtcggcggtcagccactggggccactgctaagtcgaaaataattaagcaatttataattattcggtaaagtgatggctctgtgcatcgcgacttttccggtcatcgctaaatcgaggtatgcctatgcgccgtttcaaggcgtttttactgccgggaatgtttctgattcctgttatcactttactgggctgtagcgcgccgcagggtatcgccgttaaccaacggcaggcggttgtgatggattcgccggttcttaccgccggaattctggcagagaagccggcaatctcgacgctttcggggcggagtattgcaacatcaactttaatgagcagcagcaccaaagccgtcacggtgaattatcgtttctactggtatgacgctcaggggctggatttgctgccgtttgaaacgccccgaaaggtcacgatagggccaaactcatcagtcgatattcagtcaatcaccccgaatctggatgcgcgcagcgtgcgcctctatctgtttttataattgtgttgttggagtgggataatgaaaaggtatttatttgtggcgttggccgcgctggtgctgaccggttgtccttcccggccaccggagccgaccgagcagcctgcgaccattgaacctattaccccggtgccaccgattgaaacaccgccaccggccgataaagttcctcaaccgcctaaagctccccagcctattgactgggcggctagcgtagaaccattggtggcgcaaatggttaacgccaacgatgttgccgcaggcagcgttttgttgctggacagcgttaaaaataataccaacggtgccttacagatcggtaaagctaccgccgcgctgcatcaggtattggcatccaacaagaaatttgccctgattccggctgcgcagttaaccgcagcgaaacagactttaggtctgtcggaggaggatagcctcggttctcgcagcaaagccattggtctggcacgttacgttagcgctcaatatgtgctgtatagcgacgtgagcggcgacgtgaaagcgccagagatcgatatgcaactgatgttggtacaaacgggcgaaattatctggtcaggtcatggtaacgtacagcgttgaagcgagtctgcgtgccttgattgaaactcggataccggcggtgaataccgccggttgccatttcagcccggtatccggcctaactggtgaaagctggcggataaccgggcaaaacttccaatggctggcgcgggaacactcggtcgccaaaagagaattaggcgttaatcgtcagcgtgagcagcgtatcttgcagcagatgtcggcgcgtgcgttatctccgcgagtgatgattgccaatcaacactggctggtggtggaatggctggatggcgtggtggtcgaaccccagcagttcctgcaactggccgatcgaggcacgttggcggaattggtggcgcggctgcatcaggctccccgtaccggctatccgttgaatatccatcgacaattactcggttatagcgaaagaatggatccgtcccgccgcagtgcggactggttgcgactgcataaacgctttatggcgcaaaaaccgccgcgtccgctgaatctggttcctttgcatatggatattcaccctggaaatattatcgagacaaattctggtctgagattaatagactgggaatatgcggcagacggtgacgtggcgttggagttggccgcgatgtttcggtttaacggttgggacaacgcgcggcagcaggcgtttttacgccaatatggtcagcagccgggagcctatcaggatatcgccgctttgacgcggcaaatagcacgctggtctccgtggatcgattatctgatgctgatgtggtttgaagtgcgctggaaacaaaccggcgagataggttttttgcagtgggcagcgccgctgcgccgacgatttaatttatcgggtctggattcatccgccggataacaacatattttattcaatgacgtgaggtagttgtgggtcctgtcatgttagatgttgccagctacgagctggatgccgaagaacgcgaaatcttgcagcatccgctggtgggtgggctgattttgtttagccgtaacttccacgatgccgaacagttgcgtgagctggtgcgacagattcgcgcggcttcccgcgagcggctggttgtggcggtcgatcaggaaggtgggcgggtgcaacgctttcgagaaggttttacacgtttgcctgcggcgcagtcctttgcggctctcaacgataaggaaaccgccgggcgtttagcgcaagaagccggttggctgatggcctcggaaatgattgccatggatattgatatcagctttgcgccggtattggatattggccacgttagcgccgctatcggcgagcgttcattccacagtgagccgcaaaaggcgctggaaatggccgaacgctttattttaggaatgcatagcgcaggcatgaaaaccaccggaaaacacttccccggccacggtgcggtgaccgctgattcccataaagagacgccgagagatacgcgcccactggcagaaatccgcgcacatgatatggttatattccgtgagctgattcagcgtaacctgctggatgccattatgcctgctcatgtgatctacaccgatgccgatccgcgtccggccagtggctcggcttattggcttcagcaggtattgcgtcaggagctcggttttgagggcattattttctctgacgacctctcgatggaaggcgcggcgatcatgggcagctatgcggaacgcgggcaggcctctctggatgctgggtgtgacatgattctggtgtgcaataatcgtcagggggccggtcagcgtgctggataacctgtctccggtcaaagcagacaagctgagtcggttatatcatcgtgggcagttcggtcgcgaagagctacttggctctccacgctggcagcaggccaataaagcgttaacggcgctcagcgagcggtgggacacccataaacaagggttagggaactagcacgtaccggggtgtgtccggtgcgatttaccctgtcgtagcgaggataaagatgatcgtctatttacacggttttgattcaaccagtcccggcaatcacgaaaaggttctgcaactgcagttcatcgatccggatgtgcgttttatcagctacagcaccttacatccccggcacgatatgcagcatttattgaaggaagtggacaaagccattcagcagggcggtgacagtcatcctctgatttgtggcgtcggtttaggcgggttttgggcagaacgcatcggttttctatgtggaattcggcaggtggcttttaacccgaatctgttcccacaggaaaatatgagcggtaaaatcgaccgcccggaagagtatctggatatcgcgaccaagtgcgttcaggattttcgtgagaaaaaccgcgatcgttgcttagcggtgctttcccgtcacgatgaggcattggacagtcagcgcacggcggcagaattgcatccttattacgaaattgtctgggatgaaaagcaggggcacaagtttaaagatctttccgttcacctacagcggatcaaggcatttaaaactctcgattaacatttttttctcatactcgagccccgaagcgatcgttttttgacggtaacttcgggctttttctttcccaaagccatcggtaaacggtgattttgggtaaaaaagtctgaaattattaaactgtgacctgtcgctaactatttgaatattcttctagaaaaaatcctcccgccgcgtctttcagcaaaataaattgatatatatcaattttggtatgaccaaataaccctgcatgatattctgcggtcagataattgaatttactcaagcgaaccctatgttatctaaggatattattcatttacccttagctaacaattggttcacatttagggggtcattttgacaacgccaaagaaaaaaatcgttattattggtggtggtgccggcggactggaactggcgaccagcctgggccataaactgggtcgcagtaaaaaagcggagattgttctggtcgatcgcaaccacagtcatttgtggaaaccattgttgcacgaagtggcaactggctctctagatgacggggttgatgcgctgagctacctggctcatgctcgtaatcaccatttcaatttccaactgggttcattaaccaatattaatcgggaaaccaaaaccgtcagcctggccaaaatctgcgatgagcagggcgacgtgctggtgaccgagcgtgaattgtcttatgacattctggtgatggcgttgggcagtacatccaatgatttcggtacgccgggcgtgaaggaaaactgtattttcctggataacccgcatcaggctcatcgtttccacaacgaaatgctgaatctgttcctgaagtattccgctcagccgggtgaaaaaggcaaggttaacattgctatcgttggcggcggtgcaaccggcgttgagctgtctgccgagctgcataacgcagttaaacagctgcacagctatggtttcgaaggtttggacaatcaggcgctgaacgtgacgctggtggaagctggtgagcgcattcttcctgcgctgccaccgcgtatttccgctgcggctcatcaggaactgaccaagctgggcgtgcgtgtattgaccaaaaccatggtgactagtgcagacagtcaaggtctgaataccaaagacggcgaattgatcaacgctgacctcatggtgtgggcggcgggtatcaaagcgcctgactttatgaaagatatcgccgggctggaaaccaaccgtatcaatcagttagtggttgaaccaacgttgcaaaccactcgcgatcccaacattttcgctatcggcgactgtgcctcttgcccgcagcctaacggcggttttgtgcctccgcgcgcgcagtcggctcaccagatggccagccgttgctacagcaacattctggcgttgctgaatggtcaaagtctgaaaccttacgtgtataaagaccacggctcattggtttccctgtctaaattcagcaccgttggcagcctgatgggtaacttgatgcgcggttcaatgatggtggaagggcgtgtggcgcgagtggtatatatctccctgtatcgtatgcatcaggtagcgttacatggctacaccaaaaccggcctgatgatgttggtaggcgggattaaccgggtgattcgccctcggttaaaactgcattaatagcctgaagttcagtattcgcttagcgaatcggatacccggaaattgagttctgggaagttaaaactcgtagtagcacagagaaccgtcgtcacagtgtggcggcggttttttgttttcggaggttgacccgattttgcgaacagtgattcagattcttatcagagagatttagcgtatcgaattgatattgttatgtttgaaatacaagcagcgtatttagagctaattttatcgcatcaggatattaagtttttcaccaggtgaggcttaaggataatagtccgtagtgcagaaatatgttctggtataaataataaattgcaaaaaaataatgtccggtgttatcagttcgaatgcctccattgatatatagactttttatggttgtaaataaaataaccttgcggttaggtcgtcatcaattaatgttttttaatatatttggcggcgatcatactatcgcctttatcagggctatcttgagcgattaacgtggccggtggttgatacgcccggcggtgtgaaaccgtcgatgctgaaacttatagcagccagtgaaatgagcctaagattctataacagtaaggtttggctggaaagctggcagacaccgcaggctattccgctggcgatacacatgacattgcgcacgccgtcattcgcaaaatcgaacgagtctggttgttgaaaggctcgcaaatgttttcagaaaatcaatcatgaattcggcacccaaacgcggcatcgcgatgatcgtggtgttggtgcggctgggatattgcggaaagtctgtaggcgtttgtcgacagtgatgcctcgctgcaaacccgtctggcagagaggactgggagtctctggtttgcccgattcctttctttgcgcctaagcgcgggtgaatatcagcgaactaagtgctattcagggaatagatgcggatgtttatcaaaggcttaatcctcaggtatgtacactacccatgacaagacaaagcattaatgttaataccctaaatgtcgctcacagtgtcattctggaggcattatttacccccggcttagtgccactcaggcgcagatgctgttgcagcagcggccggaaaaaggatgggaaagcatagagcagttgttgagcgtcgcgccattagccgatgtggatgccaaagtgaaagcgcaggtaaagccgatattgagcgtgaatagccgctacttttggctgcgttcctgtattgaggttaacgacgtgagcttgaccgtgcagtctttgatcgtgcgcaatggcgcacaaaaatttgatgtgctgtggcatcagacaggagaagtggagtgagtgaatctctgaatctttttttcccccttggcgaagcgcagccgatcatatggcgacgtgactcggaaacgcctttcgtaccagaaactaaaggggaatggatttccccatgggcggcgcaggatatgttgacgcaatggccgaaattcgatgcgattcgggtgtttttccccggagaatgggctggtgttcgtaaagttgaattgcctaaagtctccaaaaaacatgcagagaaaatcatccccgcactgttagaggaagacttatgcgaagacattgatgatttacatttttccatactggaaatagatgaaaagcaggccaccgttgcggtgattactcatcagaaaatgcattatcttactcagtggctacatcagggcgaaatattggcgacaacgttattgccggattggctggcgttgccggaaggccatctgctggttagtggtgaacgctgtctgcttcgcacccatcaatggcaaggatggagcgcagaatcgtccctggctccgtacttactcaaggcacagttacgtgaccgtgattcagtgagccagctctgcgtctacggtgagttgcctgcggcactggcgtcggcgctggattcgtgcggtattgagaacacggtatcaggaacgctgcccgcgcctcagactagcggtgcgggtttgctctgtggccgctggaaaccgcgagtgaactatcagaaacagtgggagcgttggcgtccgacgatgacgtcgttaatagtgcttgtcggtgtcatgacggcggaacgactggtgtcattgtggagcatcacggaacgcgcgcagcagacccgcacggcggccgaagagagtttcctccaattgttccccgaacagcggcgcatcgtcaatttacgggcgcagctcaatgccgcgctgcgggagctgggaagtgggaccgcagaggacgaactgctggtgattctacccttggtcgcagaaacgcttgagtctaaaggaatactgaaacagatagatgttcagggaattaaatttgatcaacagcggcaggaattgtatctcaggctgagagccgccgattttgcgacctttgaggcgctgcgggaagatctggcgactgttttttccgtcaaacaagatgcactgctgaaggataacgagcgggttacagggggaatgactttgaaaaggaagcaaaatcatgcgtcttaatttacggcctttgtatcaacggatggtatcaaagggcatgtccatcggggaaggcattctgacgcagcactggcagcctcgctcaattcgggagaaatggctgattggtgccgccctctgtagcctgattttggggggatactattggggaatatggcagccgctaacccgacagatcgcgctgcaagaaggggtattgcaacagcaacgagcgttgattgccaaaatgcgcgccgctgcaccggaaattagcgcgtggcgacagcaaaccccatcagtggcaaagaacgcttctgttacctcattatcacaaagggtcagcaccagcgccgccgagcacaagattacgctgaagcgtattcaggagcgggaaggggtcgttcagatagggctggaacccttgccctttaattctctcttggattggttgaatggattacgtcagaagtcgggcgttcgggcggtgcagttggatattgtcgcggcagaccaacccggagttgtcaaagtgcagcggctggagctggcgaaaatctaagaagaccggttcagtgtttatcgctgaaaaattgtgaggtcagtgccgcaggtaaactgaacattagcggccagcgcgcgatgtaaaaatcattcgagccgatggtgtgcgtcagggaaagttaacctaagatttggcgcgcaaacgggcaagagtcgcaatgacgctgtttaggccgccaattcgccagcaacaacattggccgtttgtccagtcgcatgctgggattgcgcacctaatgccaaacttttagcataaaacccttcgttacatttaatagcttgctaagattcgtcctaaagccgcctttcccctgtggtttccgctgatttggcgtatttatcttattgctgtcctaaatgacattgtgcagactcactcccgataacagaggcgagtcacgcacgccgacgcccgaagttcaaacttacgaggccgctgtcagatttatcgccgttaggcgaaggtactgcggtacggagtctacggcataaattgcgtggtaacattttaggaggatttcctgtgaacaaatcaatgttagcaggcgtgggtattggtatagctgccgctctgggaattgccgccgtggcaagtatggatgttttttccagcggtcctcagtacgcacaggtgatagccgctacgccaataaaggaaacggttaaaacgccacgtaaagaatgccgcaatgttacggtaactcaccgtaaaccggtgcaggatgaaaaccaaattgcaggatcggtactcggcgcagtcgcaggcggggtattggggcatcaagtgggtggcggtcgcggtaaagatatcgccaccgtagcaggcgcgttagccgggggttacgccggtaaccgggtgcaaagcaatatgcaggaaagcgacacttacaccaccacgcagcagcgttgccagacggtgtatgacaaatcgcagaaaatgctgggatatgatgtcacctacaaaattggcgatcagcagggaaaaattcgtatggatcgtgatccaggtacgcagattcctgtcgataaaaatggtcaactgattctgagtaatcgagcataacgaaatatttgtggtccaagacctcgtaacaagagcccgcggtgtagtgttagttctgatcgtttaatagtcagtcggggtggttatccgcccctaccgttaagcgagtggcattagcattgacgcgggtttccttctgcctttcccgcgccaacactattccctacatcaattatctagataaattctttatatcaatagtcatcgaggccaccttataaccgcgtggttaagcgatacggtgctgttcgaaagaggccagtagttcctcaacaaatttcaaacgtttggtccgatcgcttaaatcctgcataaacttcagcttggttgggccttctaatcggaatatctgcggctgacgctgcaataaaccaatcagatacaccggatcgaccttgtttttctcgccgaactcgataaaaccaccgcgttcattgccttcaatccgtttaatgcccagtttttgcgcatgttgacgtaacgaagcggtttgcagcaggaatcgcgccgcatccggcaacagaccgaaacgatcgatcagttcgactttcagttcatccagctcgacgtcatcgcgggcgctggcgatacgcttatagaatgaaagcctgatatttacatcaggaataaaatcgtcgggcaacagcaccggcatacgcatttcgatttcggtctggttgctggtgagatcctccagcgacggttcgcgcccttctttcaatgcatcgaccgcgctttccaatagttccatatacaatgagaaaccaatggtcgtcatctggccgctttgatcttcccccaacagttcccccgcgccacgaatttccagatcgtgagtcgccaaagcgaaaccggcgccgagatcttccagtgaagcaatggcttccagccgttttttggcatcggtcgtcatggctttcggatttggcgtcagcaggtaagcgtaggcctggtggtgagaacgaccgacgcggcctcgtagctgatgcaactgcgccagaccgaagtggtcggctcgctcgataataatggtattggcgctaggaatatcaataccggtttcaataattgtggtgcagaccaaaacgttaaagcgttgatgatggaaatcattcatcacccgttccagatcccgctcacgcatctgaccgtggccgatagcaatgcgggcttctggcaccagttccgccaaacgttgggctgctttctcaatattttcaacgtcgttgtacagataataaacctgcccaccgcgtaatacttcacgcagaatggcctcgcggacgaccagattgtcgtattcgcgcacaaaggtttttaccgccaaacggcgcgctggcggcgtggcaataatcgacaggtcacgcataccgctcatcgccatattcagcgtgcggggaatcggcgtagcggtcagcgtcagaatgtccacatcggcgcgcatggccttgattcgctctttgtggcgcacgccaaagcggtgttcttcatccacaatcagcaggcccagatctttccagtgtaaatcactttgcagcaatttatgggtgccaatcagaatatcgattttcccttctgccgcctgctccagaatcacctgctgctcttttgcgctgcggaaacgagaaagcatttcgatacggaccggccaggtagcaaaacggtcgcggaaattatcaaaatgctgctgcgccagcagggtggtcggcactaatactgccacttgcttattattattcaccgcaaggaaagccgcgcgcattgccacttcggttttaccgaagccgacgtcaccacacaccagacggtccatcgccaacggttggcacatatcgctcagcaccgcattaatcgcctgttcctgatctggcgtggtttcaaacgggaagctttggcagaacagctgatattgttcgcgatcctgtttgaatttaaagccggacttcaccgcacgctgggcgtaaatatccagcagctcggcggctacgtcccgaactttctccgcagctttctgacgggcgcgggtccaagcgtcaccgcccagtttatgcagcggcgcgttttcatcggcaccgccagaataacggctgatgaggtgcagggaggatacaggcacatacagtttgtcttccccggcataggtcagaatcagatattctgctttgataccaccggcttccagcgttgtcagaccaagataacggccaacgccatgctccagatgcaccactggctggccgggacgcagttccgccagattgcgaatcagagtatcggtattaatagtgcggcgattatcctggcggcgacggcttacgcgttcaccgagcaaatcgctttcgcaaatcagcgctagctgacgaatatgatcgagaaaaccgcgttccgccgcaccgatcatcaaatagtgaccggtttttttcacttcatccaaacgggaaatcagcgtcgggcgtaatttaatccggcccagtaaatcctgtagggtttcgcgtcggccttcactttctaccgagaacactacgctgccgctgaagccttcaataaagcggcgcaggttatctaacggagctttcgcctgtgcctgtaccgcgacgtcaggcaacccctgataatccagattggtgttggcggcttttttcggcagaacgtcagttttaagttgaatgcgtggccagtctttgagctcgctaaacagaccgtcagtccgcagccacagggtttccggtgccagcaaaggccgcatggggtcaatgcgacggctttcataacgctgattgacatcctgccagaaacgctcggcggcggcttccagatcgccggtattcaccaataaggtgttgtccggcaggtagctaaatagggtgggtaacgcctgactgaaaaatagcggttgccagtactcaatacccgcaggccagatgcctttgctcacctgctggtaaatatgttcagggtcgcgtcggacttcaaactgctcgcgccactggctgcgaaatagctcaatggcggcctgatcaataggaaactcatgagcaggcaataaattgatgtgttccacttccgacagggtgcgttgagagtcaacgtcaaatacccgcaggctgtcgatttcatcatcaaaaaaatcaatgcgataaggttcttcgctgcccattggatataaatccaaaagcgctcctcgggtagcaaattcaccgtgttccatcacctgatctacgctgcggtagccagcttgctccaattgggaacgcagtttatcgcgagataaatgctggccttttttcatgaccagcgcgtgaccgtgcaggaattcgtgaggacagacccgctgcatcagcgtatttacaggaagaatgatcacgccgcgtttcatcgccggtaactgatacaggcaagataaacgggtggaaataatatcctgatggggggagaaactgtcgtaaggcagcgtttcccagtcggataaagtcgtgacgctgtgggcagtaaattgctgaatttcatcccgcaggcgcagggcattttgcatatccggcgcgattaacatcaccggtcccggatggcgttcaataatttcggcgcattcgatggcgcaggcagcgccggttaattggcctaactggcgtatatcgccacggcgctcaggtaatgagtaacggtattgttgggacataagcagttaagcaatctctttggttcagcactgcggcaataacgatattgcctatcctagcatgcgatgacgcaaggctgtggaattggcgctatttctggaataaaagccggagatataggctgttagtggttccataaagcggcggtacgctttattatcctcgatcactttgctttagcaacaggatctcaacagatttcatgtatcaacctgtcgcactatttattggcctgcgttatatgcgcgggcgtgcttctgaccgctttggccgctttgtttcctggctgtccaccattggcattactttgggcgtgatggcgctgataacggtgttatcggtgatgaacggctttgaacgggacttgcagaataatattctggggctgatgccacaggcgttgattactacgcccaaaggctctatcgacccggaaaaaatccccgcctcggcgctaaaagggctaagcggtgtcagcgatattgtgcctttgaccaccggtgaagtggtgttgcaaagcccgcgtagcgtgaacgtcggcgtgatgctgggtgtcaatcccgaacagcacgaacccttaaccaattcgctagtgaatgtacatctgcgtgatctgcaaccgggtcaatacaacctgattatgggtgaaaagctggcgggaaaactgggcgtgagtcgcggtgaaaccattcgcctgatggtgcccagtgccagccagtttacgccgatggggcgcattcccagccagcgtttgtttaacgtcattggcacttttgccgctggcagcgaagtggatgactatcaattgctggtgaatcagcaggatgcttctcgtctgatgcgttacccggcggggaatatcactggctggcgtttgttcctcgatcagccgttgcaggtggattctctcagccagcaaaacctgccggaaggcacggtgtggaaagactggcgcgagcgtaaaggcgaactgttccaggctgtacgcatggagaaaaacatgatggggctactgctgagcctgatcatcgccgttgctgcgtttaatattattacctcactgggattactggtgatggagaagcaaggggaagtggcgattctgcaaactcaagggcttacccgacgccagattatgctggtgtttatggtacaaggggccagcgccggggtgattggcgcgttgcttggcacgggcttaggcattttactcgccagccagctcaatgtgctgatgccggttctgggcctgttgctagacggcgcggcgctaccggttgccattaatccgctacaagtgacggtgattgcgctgttggctatggccattgcgttgctgtccacgctttatccttcctggcgcgctgccgccgctcaacccgctgaggctttacgttatgagtaaccaacctttattgcagtgcgaaaacctgtgcaaacgctatcaggaaggacaacttcataccgacgtattgcgtaatgtgacctttaccattcagccgggtgaaatgatggcgatcgtcggtagctccggctccggcaaaagtacgctgctgcatctgctgggcggattagattcgccaacctccggcgaagtcatttatcaggggcgctcactgagccagctttcttccgccgccaaagcggagttacgtaaccgcgaactcggttttatctaccagttccaccatttgcttccagactttaccgcgttggaaaacgtggcgatgccgctgttgatcggcgggactaaaccggcagaagcgcaagataaagcgcgtgccatgttggcggcggtggggctggagcagcgcagtcagcatcgtccttccgagctttccggcggtgaacgtcagcgcgtggcgattgcccgttcactggtgaataacccatcgctggtgttggcggatgagccaaccggcaacctcgatcagcgcaacgcagacagtattttcaatctgttaggtgagctgaacgtacgtcaggggactgcgtttctggtggttactcatgatttgcagttggcaaatcgcatgagccgccaactggaaatgcgtgacggtcagttacagcaaaatctgacgttggtgggagcggagtaatgcgcagttcacctctttcactgctaataggcttgcggtttagtcgtggtcgccgtcgcggcgggatggtatcgatgatttcgatcatttccactctgggcattgccttgggcgtcgcggtgctgattatcggcctgagtgcgatgaacggcttcgaacgtgagctgaaaaaccgcgttttggccgtggttccacacggtcagatagcttttctcgatcaaccgtttaacgcttggaatgcgagcctgcagcggatcgaaaaagtacccggcgtcgcggcggcggcaccctatattgatttcactggactgatggaaaacggcacccaattacgggcggtgcaggtcaagggcgtcaatccggagcaggaagaaaaactcagcgcgttaccacagttcgtgcagaacaacgcctggcaagattttcaggctggtcagcagcaggtgattttaggtaaagggctggcggacgcattaggggttaagcaaggttcctggctgacggtgatgatcccaaatagcgatccggaaatgaagctattgcagccgaagcgtattcgtctgcaagttgccggcgtgttccagctcagcggtcaactggatcacagtctggcgatggtgcccctcagcgatgcccagcaatatctggatatgggcgatagcgtgaccggtattgcactgaagtttaatgacgttttcaacgccaataatctcacgcgcagcgccgcagaagcctccaatgcttatgtgaattacagcagttggatcggcacttacggctatatgtatcgcgatattcaaatgattcgcaccattatgtatttagctatggtgctggtgatgggcgtggccagttttaacattgtgtctacgctggtgatggcggtcaaagataaaagcagtgatattgccgtgctgcgaactttgggtgccaaagacggcctgattcgggcaattttcatttggtatggcctgctggccgggctggtgggaagtatcagcggcgtggtggtcggtgttgtcgcttcattgcagttaaccaatattatcagtgggttggaaacgttgatcggtcatcatttcctgtccagcgatatttattttatcgattatctaccttcagaactgcattggttcgacgtggcctgcgtattagccacggccattgtgctaagtctggtggccagttggtatccggcccgtcgcgccagccgtattgacccagcgcgggtattaagcgggcagtaacagcgcgatcacaatagacgaggaatccggttgttttagccggaactgaatggtactgataaaccgtttactgaataaaggtaaagttatgtattacggttttgatatgggtggtaccaaaattgaaatgggcgtgtttgatgccgatttacagcgtatttggcaaaaacgtgttccaacgccaaaacaggattatcagcaattattgcaggtactgacggaactcacccacgaagccgatgagttttgcggcgcgcagggcagcgtagggatcggtattcctggtttacccaatgacgacggcacgttgtttaccgcgaacgtactggcggcaatgggcatgccgttgcaagccgatctttcccgtctgattgggcgggaagttcgtatcgataacgatgccaactgtttcgctttatccgaagcttgggatccagaattccagtcttatcccagcgtgctggggattatcctgggcaccggcgttggcggtggcattattctcaacggtcaggcgatgaccggacgtaaccatatcagcggtgagttcgggcactttcgcctgccaattgatgcgctcgacgttttgggtgcagatattccccgggttccctgcggttgcggccagtacggctgcattgaaaactatatttcaggccgtggttttgaatggatgtacgcccatttctacggtgaaacgctacccgctacgcgcattatcgaaaattactacgccggtaacgcacaggccacagagcatgtcgaacgttttatcgccgttctggcgatttgtctggggaatctgttgaccattattgacccacatttggttgtgataggcggcggattgtcgaactttgaacatctgtatcaggcattaccgcagcgtttagctgcgcatttgctccccgttgcgcgtttaccgcgtattgagaaagctcgctatggcgatgctggtggggtgcgtggcgcggcgttcttgcatctgtctgatagaaaaacattataaataaagtaaaagaggcaataggttatgcgcattcgccatcggctgtgtcggtttcgcaagaataagcatctgcgtcatcaacgttttcgctctcgtattttccaccgtgatagttccgccagtacagaaatgaagaaacctttcgtggtcgtactcaccggcgcaggtatttctgctgagtctggaattcgtacttttcgcgcggcggacggtctatgggaagaacataaagttgaagacgtggcgacgccggaaggctaccagcgcgatcctaaactggtgcaggctttttacaatgcgcgtcggcgccagctacagcaaccggaagtggcacccaatgctgcacatttcgcgctagcagatctggaggcggtattaggcgataatttcctgctggttacgcaaaatatcgatgatcttcatgagcgggctggcagtaaacgagtgattcatatgcacggtgaattactcaaagtacgctgtactcagtctggtcaggttctggattggccgggcgatcttagcgccgatgagcgttgtcattgctgccagttccctgcaccgctgcgcccgcatattgtgtggtttggtgaaatgccgatggggatggatgatatttatcaggcgttggctgaggctgatttctttatttccattggtacctccggccatgtttatccggcggcaggttttgtacatgaatcggcgttgaatggcgctcatactgtagaactgaatctggagccgagtcaggtagaaagccagttcgaggaaaaacattacggcttagccagtaaagtggtgccggagtatatccgcgagtttcttaccactcgcggagaaaaccgcgaaggcgaataatttcctcagggattactgcgtttttttatgcagggacatcttggcaatgtccctgtgtcatttctgtcatagcgttattattctggcttaagtttgtttaaaactgacctgacgcaatatttgatcgtgatcacttccccataatgatatccatcattttgagggtgggaaccatggacaaattactcgatcgcttttttaactatgtctctttcgatacacaatcaaaagctaaggtaaaatccgtgccgagcaccgatgggcaacgtaagctggcggcagcgttgcaacaagagctgctggccttgggctttgagccggtgaccttgagcgagcacggctgcgtgatggcaactttaccggcgaacgttgactgggaagtgcccacaatcggttttattgcccatttggataccgcacctgatttcagtggcaaaaatgtcaatccgcaaattgtggagaactatcgcggcggcgatatcgcgctgggcatgggcgatgaaattctgtcgccggtcatgttcccagtgttgcaccagttgcttggacacactctgattaccaccgacggtaaaaccttactgggtgccgatgataaggctggtattgccgaaatcatcaccgctattgtgcgtctcaaagagaacaatattccccacggcaagattcgagtggcgtttacgccggatgaagaagtgggaaaaggcgcgcaattctttgatgtaaatgcttttaacgccgattgggcctataccgtggacgggggcggcgtgggcgagctggaatatgaaaacttcaatgcggcctcggtgaccatcaaaattgtcggcaataatgtccatcccggcagtgccaaaggggtcatggtcaatgcgctgtcattggctactcgttatcatcaatcgcttccggcagatgaaaccccagaaaataccgagggttatcagggtttttaccatcttcaaagcattaaaggcacggtagaacgggctgaaatgcattatattctgcgcgatttcagccgcgatggcttcgaagctcgtaagaaaaacatggtggatattgccaaacaggtcggtaaagggttacatcgcgattgctacatcgaaatcattatcgatgacagttattacaatatgcgtgaacacatagtggagcatccgcatattattgaactggcgcagcaggcgatgcgtgattgcgatatcgaacctattatgaaaccgattcgtggaggcaccgatggcgctcagctgtcgttccgcggtttgccttgcccgaatatttttaccggcggttataatttccatggaaaacatgaatttattacgcaggaaggaatggaacaggcggtgtcggttattatgcgtatcgccgaattaaccgcgctacgggccaaaaacgctgaaccgcagagcgagaaaaacgcagctttgatgaaatgatattgcgataaataaaggcgtgtttcgtatagattcgcccaataaaaacgccccttaggtcaaaacccgaggggcgtttttttagctttaaactgccggatatctcacaagttaatcgcggaaataccagtagccgctgttaaccagctcggtcagcgtcgccaagaaggacggctcgtctaacgcatcaccgagcatttcggcgctaacgctaaagtgttggcacaacgcatcggccgcaggcaggtgcggagtatcgatcaattcgccgttaacaaagcaattatcacctaggcgaataacccgcagtccgctcaggcgatgtaactcttcaccttggctcagcaactcatagatctcaccagcctgataaggcggttccggtggcgaaatatccagttcatggcgagactgggacacgaactcgccgaaccagtgttggaaatgctcaggctgttggaacaattccagcatcatttggcgcagcgtatccatttcctctggcaatacgtccgccggacgattacgcagtttcagatctggatcgctataacgcttgctgcctaactctctggccagcacgtaatcggcaaagccgctgaccagttcccggccgttaggcgcacggaacccgacggaatagttcagcgcgttttccaacgcgtagccttcgtgcgggaatccaggcggaatatacagaatatcgcccggctccatttcttcatcgataatggcgtcgaatgggccgacttgcagtaaatcaggatgaggacagtgctgtttcatcggcactttttcacctacgcgccaacggcggcgacccgtaccctgaataataaatacgtcatattgatcaaaatgagggccaacgccaccgcccggtacggaataggagatcatcagatcatccattcgccagtctgatagcgcacggaacggacgcatcagcgctgccgatggctcatgccaatgatcgacggcctgaaccagcagagaccaattggtttcccctaaatgatcgtagctctcgaacggcccgtggctgacctgccagcgaccttcctgatggctgaccaaacggctatccacctccgtttccatagccagaccggctaattcatcgggagatagggggtcgataaagtttttaaagccgcgtttcaggatcacggggcgcttttgccaatagcgttgcaggaagtcttgccaatccagatcgagttggtaatccattttttatcccagggattgagtgaacttgcgaatgattataacggatggcgcgtgacagtatcaggggcagggcggcaaattttgtaggaatggcactggatgcagaaaatgcggacgattctctgcgtccgcacagagcatttgagaaatttatttggcaaatgaatccggttatgaattattcgtcgtgatgctgatcttgctgtcgcccaaaggttaccagcattttggctccgcctaagggactgtcggtaacggaaattcgcccctggtactgttcaataatttctgccgcgacggataatcccagcccttgcccaggacgtaaggtatcaacccgctgaccgcgttggaaaatcacttcgcgcttgctctccggaatgccagggccgtcatcgtccacaacgatggtgagttgtttttccgagtgcagggcggtaatttccacgaactcgagacagtatttgcaggcattttccagcacgttgcccatcacttccataaagtcgtttttctcccccataaaggtgacctcgggggagatatccagagtgagtacgacgcctttacgctgataaaccttgtttaatgcactgcataaactatctaaaagcgccggaactgaatggatttcccgagctaatacattgtgttcagagcgcatgctagcgcgatggagataatagccaatctgctgggagattcggctaatttgttccagcatgataggctccacttcttcgatagtggcctgtttgccggagcgcaacgagcgcagcgtggtttgcagcaccgccagcggggttttaagactgtgggtcagatcggaaagtgttgtgcgatatttggtatagcgctggcgctcgttggtcagcaaaatattcaggtttcgcaccaagctgagcaactcgcgcggcggattttcatccaactgttcccgctcgcctttttccagctggctgatttggctgaccaaagctttgatagggcgcaggctccagtacgccgccagccacaacagggggacgaccaacaacaggttggcgagcagtacataactaaaccagttccataccatatccgaacgctgtagctcttgcggaatagtatctaccaccacaatggttaaagcgggaaggcgttcggtcgcctgatatgcgttgacggaaaccgagtgcgttagcgcgctggcgtcggtgtcgtcgtatttcttcagctgatcctgcgctttggggttgtcccctaataccgcgctactgatttcggtaccggtatccaactcatagaacccgggtttgctaagccagcttttctgaatatgagattccagttcaggcacatggcgctgtcgccacagaatgttgccgttatggtcataaatcagtaccagcgtaggaacattcagctccagctcgggaggaatggtaatgctgagtttgttgtcatgccattgagccagactaaagaacagattgctttccccccgatgagcgcggaaggtgtttttatcgaagctaacaatatagcccaccaccgctaccattccgtaggacagcgaaagcgctagaatcacgcccgccgtagccatcaggaagcgggcgcgcagggagaaaggtttactgttcgatttaaacatggcgattagttggcatcaaaccggtagccttggccacggatagtggtgataacttctttttcgtgttcggcctgcaattttttgcgcaaacggcccattaatacatcgatggtatggctttcgcgtagttcagcgtcggggtagagctgtagcatcagcgtgtctttactgacgactttgcccgcgtttcgaatcaaagtttcgataatggtgtattcaaaagcggtcagtttgatttgttgctgattcacgcacagttcacggcgagagagatcgataaggaacggcgggaattcgataatctgcgaggccagaccgctgttgcggcgcatcaatgcctgcatacgggcaatgacttcttccagatgaaagggcttggtgacgtaatcgtcggcaccggcttccagtaccgccactttatcctgccagctttcacgggcggttaataccaaaatgggcaacttggtttgatgactacgccagcggcgartcaggcttagcccgtcttcacccggcaggccgagatcgataatggcgatatccggagcatgttcctgcaaaaaatagtcggcttctttcgcatcttcggcggcatcgacctggtgtcccatctcgcgcatctgtaccgaaaggtgatgacgcagtagagcattatcttctacgactaaaacgcgcataccaaattcctcaaaaaacttgaaccgggtaaaaacttacccggaaaaataagggtgagattgatggatcagaaagtataacgcaaaccaacctgaccaatctgatcgtctaccttccagttatggtaggtataaccgacttcagccgccagactttgcgttagggcatagctcgcctcaatacgtgcttcgtgatacatcttgctatcatattccgccaggcgataggcaacgtctaagccaatgtcctgggtcaatttagtcttgataccgacttcaccggtcgcgctgttgtaagcttctgttttatcgccatctttcttaacatcgtacagcattgcgtggcggcttgcaccggccagcaggtacatatccgcatctggcgtcagagcaaaatgataacccacgccaagcaaaccatcgcccataccgcgatcgttatctgcgatagcgcywwgsckwkykgccatgaacagattgttttcaaagccataaccgccgtttaagtagaaaccgtgcattttgtcgctaccaatgtggctggtgccagattggttaaattgcttatcgaaactttgcttattatcaatggaaccgaattgaatacccccggcgataaaggtgtaatcatccgcgatagccaaagtgctagtagcgataagtgccgctgctaataaagattttctgaacataactgctcctatgatagttattccctggatgtccgcaggcaattatcaacgggagaaactaaacctttattcaacaagggggcagtgtaagtaaatgatagttaaacggcagagcgtcggatactgaaaaataagcaggcgacggggagccgcctgctgcaaagacttacttcagttcatccaccagtgcgacggcacggccaatataattggctggcgtcatggttttcaaacgaactttttcttcttctggcagcgccaagccatcgataaaggcttgcataccggcggcgtcaacacgtttgcctcgcgtcagctctttcagtttttcgtatggtttttcaatgccataacgacgcataaccgtttgaatcggctcggccagcacttcccagttatgatccaattcgtccaacagatgaggttcgttaacttccagcttgctgatgcctttcatcgttgactgataggcgatcaacgcgtagcccagacccacgccgaggttacgcagcacggttgagtcggtcaggtcgcgctgccagcgggaaaccggcagtttgcttgccagatgccccaatacggcgttagaaagacccagattaccttcggagttttcgaagtcgatcgggttaactttgtgcggcatggtggaagaaccgatttcacctgcaatagttttttgtttgaagtgattgagtgcgatgtaaccccaaatatcacgatcgaaatcgatcaaaatagtgttaaagcgcgctacgcagtcaaacaattcggcgatgtaatcgtgtggctcgatttgtgtggtgtacgggttccagttgatgcccagcgaggtcacgaagctctcgctaaactggtgccagtcaacttccggataagccacgatgtgagcgttatagttgccgacggcgccgttaattttgcccagaatttcaacctgagacagctgacggaactggcgctccatacggtaagccacgttcgccatttctttgccaacggtggatggcgttgcaggctggccgtgagttcgggacaacagcggcaaatcgcgatattggtgggccagtgctttgatggcgtcgatcatctggcgccagaaaggtaaaatcacttcctgacgagcggtttgcagcatcagagcgtgagacaggttattgatatcttctgaagtacaagcaaagtgaatgaattctgacactgcatgcagtgcaggaatgctttcaactttctctttcagaaaatattcaaccgctttgacgtcatggttagtggtgcgttcgatggccttaatgcgcagggcatcctgttcattgaactctgccacgatcttgtcgaggtaagcgtttgcgttggcatcaaaagcagggacttctttaatttctgcgcaggctgccagtttttgcagccaacgtacttcgacctgcacgcggaatttcagcaaaccaaattcgctgaagatagcgcgcagtgcgctgactttgtcgccgtagcgtccatcaattggggatacggcggtcagtgaggataattccatcggtagcaactcctgggatcaaatattaacgatgagcaagaatactctgcgcctgcttaaacagacgattacgagaaaacataagctgtaaacggcttccacctacctgttgccacagcaccgcagagcggataccggctaacagggcggcgcgaactttggcctggattaaggtgctttgcagcatggccgggttgccggtaacctgaatgcgcggcccaagtgggctaattacatccacataaatggcggccagagcgctcatcatagtctctgattcgagatcaaaatgagcgagctgacgatctaactgactgatacgttcgcccaaggtgctcatggctgactggtgagcatttagcttccgctccaataccatcaggctcagagcgtaacgcgtcagttcggcgctagggccttggcggttggcattcagcactacctgcaaggtttccagccccatggtgaggaatttctcatctccaccgtacaccgcaagagtcgaatcgggattggtcagcagcacgctgttgagtgaagtatgcagtgcctcgttgtcgcattgaccttcgtgagccagttgctgaaccagacgcgcagactggcagatacctgccagcgccagcgtgatgtcgtaataattctttgccacgattgctcctgtcgagattattggtcgctaacggggtgacgtgattcgatgataccgccgccgagacagatttcgccctgataaaacaccgcggactgaccgggggtaacggcggcaaccggattgtcgaaacgcacatcgatacgttcgtcatccaacggcgtaaccgtgcaaggaatatcttgctggcggtaacgggttttcaccacgcagcggaatggagccgtaaccggttcgcgatcgacccaatgtaattgctgagcaatcaaaccggtagacatcaaacgcgggtgctcatggccttgggctacaatcagcaagttgttggcaacgtctttatccaccacataccacgggtcatcgccaccttctttggtgccgccgatacccagacctttacgctggcccagagtgtggtacatcaaaccttggtgttcgccgacgtgtttgccttcaacggtcataatcgggccgggttgagcaggcaggtaacggccgaggaaatcgcgaaatttccgctcgccgataaagcagataccggttgagtctttcttcttggcggtaaccagatccagctcttccgcgatacggcggacttccggtttttccagttcgccaaccgggaacaggctttgcgccaattgatcgtggcccagcgtatataagaagtagctttggtctttattgccatccagaccgcgcagcagttggcttttgccattgacatcgtggcgacgaacatagtggccggtggcgatgtaatcggcgcccagatcttcggcggcaaattcaaggaaggctttaaatttgatttctttattgcacagaatatccggatttggcgtgcgcccagccttgtactcttcgaggaagagttcaaaaacattatcccaatattctgcggcgaaattgacggtgtgtaactccatgcccagcttatcgcacactgcctgagcatcggccaaatcggtcgctgcggagcaatattcttcatcgtcgtcttcttcccagttcttcatgaacaggccttcaacctgatagccctgttgttgtagcaggtaagctgaaacggacgaatcgacaccgccggacataccgacgattacttttttctggctgttatctgacatgggagtctcactaacttaagcgccgagcgtgctgacaatggataatccgtttcgcattgcgcggcaaacaaggcattacaaaaacaagcgtcggattttatcacgttgcctgtcggggcgcaccgcacaatcacggcttagggtaaattacgccaattaattatcgggctgaatcaatgtggccagttaaaggtactaattagatcgagcgagtagcgctcaggctgcaaataacagcggatactttcggcaaccagaggagagcgcagattgggtgcgtgcaatatttcatcggcggttagccacaggcagcgatcgatatcgctatcgtgaggctgagtaggcaaaatggttaccagttcaatcacaaaggcgaagcgtaggaacggcgtattatcgggtgcaacccattgatgcatccgtaaaaaggattgaggcgtcgcgcgaataccggtttcttcccacagttcgcgttctgcggcctgtagcaaggtttcatcggcttccaaatgaccggccggttggttccacagcgctttgccattaatagtttcttcaaccactaaaaacttgtcttgagaatgcaccacgcaggccacggtaacatgaggtttaaacatcgttaatctccttccattggccgggttgtaaatctcccaggctaagattacccatactaaaacgaatcagtcgcagggtaggaaaaccgacgtgggcggtcattctgcgtacctgacgattgcgtccttcgtacagggttattttcagccaacgggtcgggatagatttgcgctcccgaattggcggatttcttggccacagccactccggttccggcactttttcagcgccagcgggaagcgtggggccatcttttaacgtcacgccctgacgtaaacggcgaagtgcttcttcgtccggttcaccttcaacctgaacataatagaccttaccggtttttttccccggttgcgtcagttttgcctgtaatttcccatcgttagtcagaaccagcaaaccttcgctatctctatccaaacgaccggcggcataaacatcattaaaaggaataaaacccttcaatgttgcccgtccagcctcatcggtaaactgtggtaacacatcaaatggcttattcattaacaccacgcgacgtgggccttgcaccggcgcaggtttcgcctgtgagcgggagctgaatcggttaactttgtgatttttaacagagattttattcatgatgattgcgcttccagttgattagcgcattatacatcaatccgttttggattggcgtgaaacgaatattcaagtactattgacaagaatcttacaaggcattaacaaaaattgcgctgaaggagaggttgatggaaagcaaagtagttgttccggcagaaggtaaaaaaattacggtcgacgctaagggtaaattagtcgttcctaataacccgatcattccgttcattgaaggcgacggcattggcgttgacgtgactcctgctatgatcaacgtagtggatgcagcggttaagaaggcctataacggcgagcgtaaaatctcctggatggaaatttacaccggtgagaagtcaactcaggtttacggtaaagatgtctggctgccagaagaaactctggatctgatccgcgattatcgcgttgccatcaaaggcccattgaccactccggttggcggcggtattcgttctctgaacgtggctctgcgtcaacagcttgatctgtatatttgcctgcgtccggtacgttattacgaaggcaccccaagcccggtaaaacacccagaactgactgatatggtgattttccgcgaaaacgccgaagatatctatgccggtattgagtggaaggccggttcaccagaagctgagaaagtgatcaagttcctgcgtgacgaaatgggtgtgaagaaaattcgcttccctgaacaatgcggtatcggtgtaaaaccttgttcagaagaaggcactaaacgtctggtgcgtgcggcgattgagtatgcaatcgacaacgatcgtgaatcagttactctggttcacaaaggcaacattatgaaattcaccgaaggcgctttcaaagactggggttaccagttggcgcgtgaggaatttggtggtgagctgatcgacggcggcccgtgggttaagattaagaacccaaaaaatggcaaagatatcatcgttaaagacgttatcgccgatgccttcttacagcaaatcttgctgcgtccggctgaatacgatgttatcgcctgtatgaacctcaacggcgactatatttctgatgctttggctgcacaggtcggcggtattggtattgctccgggtgccaacatcggtgacgaatgcgcgctgtttgaagcgacccacggcacggcacctaagtatgctggtcaggataaagtgaacccaggttctattattctctccgcagaaatgatgctgcgtcatatgggctggactgaagccgctgatttaatcattaaaggcactgaaggcgcgattcaggccaagacagtgacttatgacttcgaacgtttgatggaaggcgctaagctgctgaaatgctcagagtttggcaacgctatcattaaacacatgtgatattgacatgtctataaaacttcacgggagcttatgcttccgtgggttttccaactacttagtatttcttctgcaaaactcctgcaaaaccctcctgcaaaactgtacaaaaaacaccctcaattaaacagctaataccagccattctttacccctatcatcattatatttatcagtcatagcctgatttttatgtccgagtaatgttttagtatccactccttgttctcgatataaccgctctgctagggatcgctgttcatggaaagtaggtggggtaccctctttccattgcaatccacttttatctctggccgccgaaaatccggtagtgattgcgttgctagatacttgaccaccacgtttagccattgatgttgtatgatgataatgaagcatgtacggactaacgatcatattgcgacaccgtgctataacatcttgcagcgtataaccgacagtctcacattttaaggttatgggtatggctattctggtgcccgttttttcctgcacgatatgaaggtgattatcccaaacatcgctaaatttcatgccagcgatgtcacctaagcgctgaccggtaaccaaagcaagaagcattgcattttggatataaccttgcatattggcagcggcattaaatattgactcccattcatcaaagttcaagcgaatacgggtaaccttgtttgctggttgcttggtggccagagcagggttatagccaggcggcacctccccagcgtgttgagcttctttgtacacatcgatcagcaccatccgaacaacctgcgccatccgtttttgccccttctccttatactcttcaatgacaaaggctatatctctagcgccaacatcaggaagggttagcattccacaatgacgtctgaacgcttcgactggtgcatttttttgcttaagtgtgttgagttttatttcctcactgtcgtaacgttctttctggatagtgagatagcgatccagccaagagttaactgttattgccttaccagttttgagactgatctcatctcgcgctttgagcaattgccccatttgttgacgggcaaaacggctattagcctcaatagcgatagcctttgctgcagcctcatcatcacctaatccatgaaatttacgggtaataggatgcttataacgccagtagacctttttagttctggcgtcggtatagcacgatagacccggtacatttatgttgtacttacgaggtctggccatcttccattatcctcttcaaccttaaatcatcatctttcttcactgccggtttgacggtcacgccgacaaatcgtgcgttcttgtccactcgccagcacctgccagctttaaacggtggcggtgagatcatgccatgttgcgcatattttagtaacgttggatagctggggatcggctcgtcaaactcctcggcggcccatacatccaaagtctgagttctagccataattagccgccttgcttatctgtagggtaaaacgtttctgaatattttgacggatagtccgccaagtagtcgcttaatgtccgtgaacaattctattcgctatcctggctggtggctgttatcaggcgctgataaatggctgatacatatcttgcctggtgcaacgcatcggccagtgcattgtgccgttcgccgtcaaaaggcatatcgcgcttgggatcaaagccgattgctcgccccagttttacgatggtgcgtacgtcgagatcattaaaccagctccaacatggtgacatctggcaacgctcatacgccgcacgcaaaataacgttgtcgaacgctgcgccattaccccagacgtgtaagtatctggtgcttgggcaatgttcagaagcaaattgatttaagttcaataaagctgctctgatcggcgttgggtcataggcaatcgctgaacgtgcctcactgctttgggttagccaccaaagaatggtgctagcatcagcgatggcaccgagggacatttcactttcgagatcgaccgcggtataaaattcagcgccaatttcgccggtagccggttcaaagaatactgcgccgatcgccactatcggggcgttaggcttgttgcccatagtttccaggtcgatcattaggtttttcatttattttccttggttgcttaaatagagaatgccatcgaccggcaggcattcatattcaggtggcaggccttgctgttgaatgtcagccaggcagtttttatcatcgggatagatatagccttgcggttcgtactggcagggctggaaggtgtagcagaccagcagaaacagtccgacactcataggctttgcccttcgccaaccagttcgttgtaacgctggataaacatggcgcgagcctgaacggagccaacgggaataatggcgatgtcttctgacggtgggatgccttcgagcatcggccagactttgccatcatctatatccagatcccggcgttcggtggccagcatgaccaggtcggcataatggacagaaaaacccatctcatcaggcagcccaaatttctcccggataaccaaatcaatctggcgttctacggcttggtaatcaggcaataagcgtttaagaggggagggaatatctttgcagtaggcttcgctggcatcatgcaacaaggcttcaagggcaaactcagcaccgataatctgactcatcagcacactgtgctgcgccacgctgtagaaatttggcaggtgaccagcaaaacggcattcatgtgataacgcctgtgcaatatcttcaatacaaatactttctgcagtcggttttgaataatcaaaacgctgaccggaaaacgttgtaatacacgtcataaatatactccacacggtttttaggtaatactccaccaaataccccatcgctgggatatttgaggttgtactaataattaatgtttatgcgttaaaattaccgataaatgtttctacttctacgccgtcaaatttcgcaattaatagatcgcgaaattcctgcgctattttttcttgctcgccttccaactgaacaatgcgcaaaaccagaaccggcacatcaccgccagtcaggatactgtagcgtaatttaaatcgacgctcgccaagcccttcgtatggcacacatttaaactcaaaggtggcaggcataatatctttgctctttgcttctacggtttccataacggaacgcttaccgctgaaatcgttgtcttcatgatcggatgaactggttgattcaatggtaatgcggcgtactgcgcctacagcttgtcggatatctaatacaacaccatcagcatcaaaggccataaggtattcgcgccagtcttccagccactcggccagctctttctggcgcttcttctgaccatcaatagccagtaactcacggaatggggcggtttttttgagagataaattggcggtgttatccgcatgaccaggttcttcaagtgtaccgaggttaaacacggtcttggcactcatatcatcggcatcgataaagcaacgcacaccattacctgcgtaaccagaggaatatttcacatactcatcaatgctgctggtttttaagttgccacggaaacggaagcgaccgttctggaatttttcgaggctgtgaacagtaacatcattgggcaaagcaatagtcaaacaatcagcagaagataatttcgcttccacttgagtcgtcattgccatattgcgaatttcttgaattgcagacgagtttaatgcttgagacatattaagtccttaatataaataataagttaaatagcaagatggatttaaattggttgcgtttaattaacggtttttaatcttccgtcagtctcgcctttaatagtgaatagctggccttggtcttcctgcataattgccagcttaccgcctttacctacatacattggtgtttcggtagtatcttcttcggacgatttaccgcgtggcgtcggggttgtaaatttcagtttatgggcaatcatgacgcgcttttcttccattgagttgctgatccgcgacagatcaaactcaacgatgactttacctttgccgccattattcagaacgcctaatgccgccgcattcaacgctgctgatattttgttttcaaaaataccggcatccaactcaccgagaaaatccggcacattggtttttctatcttcactactcatcggggtgaccctcagttacgcagtgcaacactgcagttagttactccacacacatagagaagagcaccggaacgggggctttatactgtacaggttaaaagggataacccgtccggagcacttctctgtgtgaaaagggcggctggcctaatctggtgttggcaggcgcagccgcaaaagacacagcacagcaatggaactcaaatctgtgcctggttacttctccacctcaggcggcggtggtatcctcaaagtccctacaacaaggaggatttttctgtgaacaatgaaaatataaacattcgtcttaaagctatggaacttgccattacgcgtcttgcaacttcaattactgaaaatggcgggccatcatctacagatctagaaggacacattctttattttcgagagcgtcttggtcgtggtgatttagaacctcaacaagaactgattttcaaacaaacactggcgctgcttgatccgctatcaccaaaaccaggcgacctgttttaattatccgtttcacaaaggcttttactggtgtaataaccacgcttcacggctgcttgattactcagcatcgactcagcgaggcgtatgttttggttggtttttgcattaggtttaagtttctggagttctttggagtcctcgagcaacaaacgaatcaatgcaatttcacattcattaatagcctggtatttaagcccggaaggtaggttaaatgtcctgccttcaagtttatcgctatcttttttgctgatttccatcctgattactccacactgttaaccctactaagcgaatcatccgatgtttctatgccaccggcagctactacgtgggcgtcctgctgtaagtatcccagctttagttccacacactttttgagatttccggtttctcagccatcagccgatattcttccggcgtcagattattcagggattcatgaggccgctcactgttgtattcattcagccagcgctccgttatttcccgtgcttcattcagtgttctgaacagataaaaatccagtatttcggtccggtacgttcggttaaaccgttcgataaacgcgttctgtgttggtttgccgggcttgataaattccagcatcacgccatggtcttcagcccattgtgccagcgccagtgatatcaattccggcccgttatccatccgcatcttcagcggatagccacggtttgccgctattctgtccagcacccgcacaatgcgctgcgccggaatattcaggtcaatttcgatagccagagcctcgcggttaaaatcatccacgacgttgaaggtccgaaaacgtcggccacatgtcagcgcgtcgtgcataaaatcaatcgaccagctttggttgagggcttccggcgtggccagcggcgccggattacgcaccggcaggcgttgtttccctttacgacgaaaattcagttttagcagacagtaaatccggtgtatgcgcttgtggttccaggcgtatccctgcctgcgaagcacctgaaaaagcttcttaaatccatagcggggatagcgttcagccgcctcagtcagcctctggatcaccggttcatcacgtcgtgtattcggttgataacgaaacaccgtcctgctcagcgataacgtcctgcatgcctggcgtatgctcatcgtaaactgcgtggtcagatagttgacgagctcacgctttatcgctggttttaaagctttttttcgatgacgtctttcagcgcacggcattccagactcaggtcggcaaacatctgcttcagacggcgattctcgtcttctagatctttgatttttttgatatcagcggcttccatcccgccatatttcgccttccaattgtaatagctggcttcggaaatagcagcctcgcggcacacatctttgacggtcctacccgcttcgacggacttcagtacggcgatgatctggtgctcggtaaatcggatcttgcgcataaggatctcctcaggtgacatcatcagtatgtcggaagatctctaaaagtgaatgggccgtttaagcgggatacttacactgcctgttcgctgttgatgaacgtaattaaacacctaggttgtttttgtgtcaacaactttggttgtattttgctttgttggttgtttttttgttggttttaaaatagaaatttgatgggaatgtttcaaagattttagaggtgaatcaaagaatcgctgcgaattggactgattaagagtagacgtttacgtggctccccaagtaaggggagccagagaatggtgggtgcttctactttttcttatttctgaaattatcatcattcatacagtaattgtatgaatccaagattagccctgataatcgtagaatgttctcaggacgatctattatgatttgattgccaggagccacttccagtccagctcgttcaacttctgcgatagctttttcatctagctcaattggtagaattattgttggtcgctgtttgctatcgaaataacgcacaagccaacggtttgattttccttggcaaagaatattatagtaactagctgtatcttttgccgaaatatcagcctgttcaccaagtaataattgaatattactaaaaaataatctttcgttatgcgtagtaactatatttgaattttctgggtctacgactggcgctgtttcatctgttattttcatttctggcgctagtacagtttcaatatttttgtctttgttggaagccattgatagcccagaaacgaccatcgcactgactgctcgctctactgccatttttactaatggtgtgatggtgtcgaggaatttttgatttaactgtcgttgtacgctggagcgacttgcaacataacgaacaaaatcagcatcaacatttcttaaactatcactgataacatcggtgaatgctgataagtaaatgctttcttcagccaaggttctaagtgcttctggttggaactgatcgtggcggaattgatatagctgatgtgcatcagaatcagatgcttcatccacatcaatctgtaggaatggagaggcatccataatatttctttgcttaagatcagtaaagaaacgccattgtgtgccattagttatggctgcaatggtgacttcaggtgtagcgttaaaatatctagaaagctgaggacaatggttatcaagtttttgattataacccttagcctcaatgaacattacaggaacaccatggcaaaacagagcatagtcgactcgctcacctactttaactccaggaaaatcagcaccatactcagctttaacttttgtggggtcataagagttaaaaccaagaatatctaacattggtaatattaatgcttgtttcgtagtttcttcggtagaacagtgatggctcacttttttgacatgatcagagtgcgctcttaatttctcagcgaatatcttcatattttcctttaactcttagtttgaatgacactcttaccctcattggactacttagaagtgagagctatcaataatccagaactgaccaccaaaaaacgcggccaataatttctacggtttctccatcagcatcttcgtcagggtgttctcctttattaaagctgcggatacttagtttatttcctggcatacgatataaaagtttaaggcgctttaatccgtcttgattgattgcatatattttgccatcgacaatttttttatttgcgcaatcaacagctactgtcgtgccatttggcaagatcggctccatgctatttccatgagctggaaaacaaaggacattctctttctgagcaccaactcggcgcaaagttgatttagaaaagcgaagtttgaaaccattgtagtcttgatcgcagaaactaccgtcaccagcagcaagttcaatatcacgtaggtagggcacttcaacctcgtcttcggggatcgggcatttactatcccaaggagcaatattgccccattcatgttcaggagggatattggattccttacctataagaacgttggattccttcatcggtggaacgccttctccaagccattctgggcgaacttgaagtgcacgggatatttccagtagcttagtcgtgctctggcttttaccggatgtgattttttgtatagcagcttgagaaactccagccttctcagctaatgcagcttgagttagtccagaatctttcatcgctgttttcaatctttgtgcaagtgtcatttccattctcgcgaaaatacaacctaagttatacccagtcaaaccactattgttgttgccgcaaaacaaccttagttgtatattgattgaaaaatacaaccaaggtgatttgatgaataatgtaattaaaatggcaattagaatcgttgggactcaaaagggtcttgctgaggcatgtggtgttacccaagctgccgtccaaaaatggttaagcggtaagacaaaagtggcaccaagaaatgttaaatcacttgttgaggccacaaatggtgaagttcaagcacaccaagttcgtcccgatctacctaatctatttcctcatcctgacttaaatgcgattcgcactacagaggaactatctgtaagtactgagttaaataaaaccaccaatcaggaataactattgtggataacagaaatttcccaacccctgatgacattagcgcatctatacacgctctcatcaccgcaacacccggtggttatgaacgcctggcagatgaactccatgcgggagcaagccacaacgcattgaggaatagagtccgtcaacatgcagggcaagcggtaccgattggtatggcgatcacgctggagcagattagcggtcgtactgatatcactgaagctatgtgtaaacgtgctggtggagtgttcgtcaaattgccggatgtgacccagatgggcaatgaagagctgctgattaaattcaacgagctattggctgctttgggagagtttggtcgggcgcataacgagtttacggctgatggtgttttagatcggcaggaaagtaagcggttaaaagctaaggggtacagggcgcagtcgattattgcagagattttggtggtaaccgaattgttgtggggtgacgccacagattcgcggtctgtggcgtcgggtgcattaactaaacgtgtggagtaattaacgcatgaacattgtaactgctaaacgttctatcccgcaacttcgttgcttacctgctgttgggatggagccattttgttatgtgttgagaatacccggcctttggatatgtgtcacccacagcgccgctgattatgttgtggatacattccgctatccggcactgcccgcgccaaaggtggcttgatatggctgaacaatttgaagaactggatcggcattatgtcgataagcgcggtgtacgtgttcacgttatctgtttcaaccggttaagccgtcaggttatttatcgccgtgcaggttacgagcatgaactgtgtaagccgctggcgcgtttcagaaaagaatttaagcaggtgggtgtatgagcgtaaagctatccagttatgtgtgggacggctgtgcggcggcgggaatgaagatagctaaggttgccatcatggctcgcttggctgacttctcgaacgatgaaggtgtgtgctggccatcggtgacaactatctcgcgccaaattggtgcaggtgagagcacagtacgtacagctatcggtgaattggaacgtgatggctggttgatgaagaagacacgccgagtcggcaaccgcaacgccagtaacgtctatcagttgaatgtcgtcaaacttcgggctgcggctcacgcgtcagaatatgacacctcaaaatctgatgggtcaaaatctgacgcatcaaaattcgacgggtcagaatctggcaaaaatagccgttttgacccgccagaatctgggggcgatccgttagtaaattcaaaacaagatccgtcagataaaaagactgttggccagccgccgatggccgccgacccgcagcaggttgataaattaaaaattgattacccaaaagtcctagaggcgtatcacagcattctccctgaaatgcctaacgtcgtggacatgaccgctgaccggcaaaccaagctacgcaaactctggaagaaattcgatttcaatcaggaacgctgggcggcttacctgcgctatatctctaaacattgccgttggatgctggaagaccggccaaatgcagcagctggaacaacgtggcgtcgcaagaattttgactacctgattaccgaaaaatgttacatcgctgttaaagaagagcgggctaacgatttgccaaaagtggcgcgtatcgactctgctggccgagacgaggcatttggccgcttggtttcacagcgttgtaagcctcagaacaccgttgaagaactggcgataacgactgcaaaacgtgcagggcttggtcggatgaacgaagtcatggctcgatcagcatggaaaaacatctgggcagaagcgcaaaccacggcgagtgaaaacgaattgaaggagctggcgtcatgattgattttactcaaacccagtatgttcaggatctggaagcacttaaatcgggtgaaagtcattttttaaaaaaggttggtgatcagtggcgcacccccgatgcattgttctggggtatcaatcagatgtttggcccattggttctcgatttattcagcgacggcgataacagcaagtgtcctgattactacacggcggaagataacgcgctggctcagaattgggcagaacggctgaaagagcttaacggtgctgcatttggcaacccgccgtattcccgcgctaagcaacacgaaggcgaatacattaccggcatgtctcacatcatgaatcacaccgtggccatgagagaaataggtgggcggtatgtgttcctgattaaagcggctacctctgagagctggtggccagagcatgctgatcatgttgcattcattcatgggcgagtaggttttgatttgcctctgtggttcaaacccgccgatgaaaaacaggtgcctagcggtgcattcttcgcgggtgcggttgccgtattcgataaaacgtgggcgggaccagcgataagttacattccattggaacagctgctggcaaccggcgaggcattcttagcccagatcagcagagaagctgcccgcctggtaccacaaagccagcaacaaaatattcctgaaattattccggtaccggaagccatacctcagaatattgaacataaagaggtggcagcatgacactatttcatcctgcagtaacgatgagcagccgggaaattgctgtactggtaaagagcaaacacggtgatgtaaaacggtctgctgaacgtttattttctgcgggtattttaaccgcgccgttggcgcagttcgagtttgagcataacggcaatagctattatgagtaccgtttcaataaacgtgactcacttgtgttagttgcccgcctctctcctgagttcaccgctgctgtagttgaccgctggcaggcgctggaacagaaccaaatcccccaaaccttgccagaggcattacgccttgctgccgatctggcagaagaaaaacaaaaactggtttccgaactcgccattgctgccccgaaagcagaatttgtcgatcgctatgtcaatgcgaccggctcaatggtattccgtcaggtgtgcaagctgttacaggcaaaagaaaccgacttccggttattcctgatcgaacataaaatcatgtaccgactgaccaacgggctgatcccctaccaacaccatattgaccttggtcgctttgaagtgaagaccggcaccagcaccgtcagcaatcacgcctttacccaggcacgtttcacccctaagggggttaagtggatcggcggcttgtgggctgaacatctggcggcaggagaagcggcatgagggcactgttaacgccattcatccagcgtgaattgggcgtcgtgatattcaagcccggccctgcgctgttgccttatatgtccgggcgtttgctggtggccaccgagcctgatgaattcaaaagcctgcccgccgggctactaccagtggaaaaccagcagttagccaatgatccgcgccttgctgcctttttcaggcatgaacgtgtaattagtgccgttggtgggcgaagtgcacttaaagagtgggtggagaggaaaggcgaatgccaatggcaggataagaaaggctaccacgataagaacctgaccctgttggagtatgacggcagcgccatttgtttgtgttggcactgcgatcacaaggttcgggaaaagacactaaagcaactggataccattgccgctgcaaatttgcaggcgtgggtggttgatagtgctaaccgcgccttaagtatgccgagcgagcatcagcttactttgcccgagttctgctggtggtcggtgttggccgaagtttacgacctgctgccggatgccattgctcgcgtctctctgaagatgccagccgcaaaaatagaaaccggcggtactaaagaaagtgatattacgtggtcacctgcaccggcagaaatcattgaggccaaagttaagccagtactggcgttaaaagtcgatccagagccaccagccagttttatgctgcggccaaaacgacaacgctgggaaaatcgcaagtatctacagtgggtgaaatctcagccctgttgcggttgtgggcatcaagcagacgatcctcaccacatcatcggccacgggcagggcggcatggccaccaagtcccacgacttatttactattccgctgtgtcgccagtgccacgatggattacatcgagatcagcgcgcatgggaacggcagcacggtagccagatagttctgttatttaaatttttagaccattcgattgcgatcggtgctttggcctgatggccgttatttgtggagtagtcacttatgaattcagtaaacggtgcgcggaccgcttgcagtagccaggagaaaggcgtgagagatatgcagtacaccttggaattatggggtgcatgggctgctagcgaaaatagcggggtagattggcaacccatcgctgccgggtttaaaagccttttgcctaacaccaataagtcacgtcctcagtgcagtgatgatgatgggatcatgattgatggctgcgtggcacggctgaagaagtacaaaccggaagaatatgacttagtggtgctgcactatgtctttggcatatcgctcagggcgatagccaaacggcgtaaatgttcggatgggactattaggaaagagatgcagactgcgactggatttatatcagggatactatgtgtgtttaatgcttacttttaaattttataattatgaaggatgttaaaacttatgtggaggggagcgagccagtttacacaacactctaagcagttgtgttaataggacaagaccttcaggctgaacagttgtggattgtttgcctaaatttagcgattttgaatcaactagtttatgagcataactctcaaaagaggttgttttgactcgctgctggtaaccaagagatctaaatacagagacattttgtaaacctttgacggcccattcaataactcgatgaattttatcgagattgatgcgctccttggttccgtctcttttggttatcagtagtgagttgttcataagttcctgacctaaagtactaccctaactcatttggcagctgcttccgccaaataagcctaattgggaggatgtggcgtttcctccaatttcacagcgattaatgagagagtgagtaatgttttttcttagttgctagtttcatttttttactcctaatatagaaataaaacagatggttatagtgtgttgagttttatttttgtccgctaaatacctccctacatgcaggctggtgatggatgccatatcaccaccaactattaccaaaaatgagtcgatacaaacgaagaacccaatatataaatctcaacaagtcgccagctttcttgaaaccgtgccactttggttcatctattgtgttctttgtttttttcttatcattattaggtggtcttgcatgttttctgttgagtgagccagaattttttagcggctttttcatatcctttatcctttcctgaatgggatatgaaggaagccacattaaccgtctgttgctgtgggtaagccagctttacatatatggaggtgaaatattcgaattcaaggatgaatattcataataaaatcacaaagatgggaggttgttttttgttcggctagatgtagtgtggagcattcagatgattgtttaacgctttaataaaacattagtcaaatctactggttaaaaagcgagtaaattactaacgcgtacgcaaaaatgattgtactgtgataagagttgttacgcagtcagtagcgcttatctagtcaaataaacctcgcttcggcggggttttgtgttttttgaatcccaaaaaaatgagaagccccgacaatcgagtattaattgccagggcttaattgtttgtggaatgggcggtagaggtgtgctgataacacggcctctaccattcgcctgtttggaatctcacaggcgaaccaaggcccaacgcttgtgtgcacaaagcggatctgagcctaccaaaaaacggtagaacgatctatgaaaaacactgttaatttaaacagtattaaaattgttaacgctgattccctccaatacatcaaaaccttacccgcagaaagcattgacctgatagccactgacccaccgtattaccgggttaaatcctgcaaatgggataaccagtgggaaagtgaatcggcttatttggcctggctggatgagttgctggctgagttctggcgagtgttaaagccatcgggcagtttgtacatgttttgcggatcacggttagcggcagataccgagttgttagttcgtggtcgctttaagctactgaaccatattatctgggctaaaccatccggcccgtggaaacgtcagcgtaaagagagtttacgggcgtacttccctgctactgaacgaattatcttcgccgagcactacgccgggccgtttaagcctaccagcaaaaactatgggcataaatgcactgaactgaaacgcacggtttttcgtccactaattgattactttcgatcggccagggattcattgggcgtttcggcaaaagaaatcaatgcagctaccggcaaacaaatgtccagccattggtttagcgagagtcagtggcagctgcctagtgctgaacaatacgcgctactccaacacttgtttgatcgggttgcatcggaaaagtaccagaaagggtgtttggcgaagccgcaccatgagttggttaagacatataagacgctagatcggcagtattcagaactcaaagcagaatatgaacacttacgccgcccgttcagcgtatcggttgatgttccctataccgatgtttggacatacccctcagtcccgttttacccaggcaaacatccgtgtgagaaaccggctgaactgatggagcatattatccgttccagtagccgccccggtgacgtcgtggccgatttctttctggggtcaggagcgacattaaaggccgcggttaagttgggtaggaaggggattggtgtggagctggaagaagagcggttcgagcagacaataaaggaaataacaaaattcgttgtttagcttcgattccctctatctttgctaaatttttcttatttttacggctaataaattaaatatgaaagttttcccgagtggcttcggatataaaattccttcttaattacacaagatggagtcatagattatgaaattagttagtacggttaatcatcttgcattgcaaaatcaatcttctatgaagtctgagaaccttaccccaaaggttgggatttctgatgtagcttcaagcatgaaaagtattaaaaatgtcagcttcgatagtgttcctgtaattcattatttaaataataagggggaatctagcggtaactctgaatttaaaccttcacttattgaaaaaacatatagaaaagatgtagataaagaagcaagaaataatggcttaccgtttgcagcagggcatgattttgagggggcaaaaactatttacccttatgatcacaagctagctttggaagcattccgtcagctgtaagtagtctggttatcggtattgtaagtacaggtcgcttttagcggcctttttcgttttagcccaccagccacccaatcaactccacacacacactttgaaaccgagtggctgcgctagtgggctaaattcctcaaaacaacacccgacaatgccgggaataatattccccattggggaggtggtatgagaatgcataacgagttgcacacatgggcagactggatagaactgtttaatgcctggtggcgaggtgatgttccgctcggtggtgtcctgttgtcggtggtgatggcggcattacgggtggcctataccggcggtggatggaagaaaacctttttggaggggctgacctgcggcgcattaacccttacagcggtgagtgcgctggaatacttcgatttaccgcagcaactcacactagccgttggtgggctaattggctttatcggtgttgagcaaattcgcgctttggcgctccgttttgttggcaaccgcattggcggcggtaacgatactaaacctcaggtataaaccatgaccccttatcaattcagaatggcggctaatatcagcgccgaacttgctgcgagttggattcagcctgttaccgaggcaatgacagaattcggcatcaccactccagaacagcaagccatgtttattgcgcaagtggggcatgagtcagccagtttcacgctgctggtggagtcgttcaactacagcgttaacggtttgattgctacgttcggcaagcggttatctgccggtcagacttcggcattaggccgtcagcgcggtgaaacgtcggtaccgcttaaccgtcagcaggccattgccaatctggtgtattccggccggatggggaataaaggcccggcagatggttggaaatatcgcggtcgcgggctgattcaggttaccggattagataattaccgcctgtgtggtactgcgctcaagctggatttggtcggcaatcccgatcagctgcagcttgatatgcattccgcgcgttctgctgcctggttctggcagtcccgcaattgtggccaatatgctagtgatattcagcgcgtgacgttgctgatcaacggcggttataacggtattgatgaccgcaaggcacggtttgaaatggctaagcgtgtgctgctatgacgtggctattcagtcactggcgctttgccggtgtggttgtgctggtgggcttggtgtcggtactggtgttcaacagttaccgcctctcaaatctggtcgaaaaaagagaagtggttattaagtctgtcacagcagaacgtgacgtggcgctagctagtgttcaagcaatgaaaaagcaacaacagcaagttgctgctcttgatactaaatacgttaaggaattagccgatgctaaaactgagaacgatcgccttcgcgctgacctcgctactggcactaagcggttgcagctcaacgccagctgtaagcgattgcccgaagccgcaactacccccagcagccctgatgatgccagcccccgatatgatgcagaatttgaacgcaattatctcagtctcagagagcggatcggcatcgcaaccagccagatagctggacttcaagtttatatacgtgatgtgtgtcaataatcactaaaattaattatttattcggaagttagagcaaaatccagtctactctcatgaggtttttaaataaataataaccttaaaggtgtatttaatgaaagatggactgtatcacgtaaatcccaaaagtaaccagcaggattctggtataggaattgtgactgttaaagataaaaaattaacggtgataacctgttacttagtattactcgcttcaatgaccaaggaacgtctgtttttgggaatattaaaactttccaattacaattaaaggtaaactcgacggatacttgatctcgcttagatgggcatgtgaaagatagcccacaaatgcaaattcacgccaatcgtttgtccgattttatttaaactatagcgttgaagaaaaataaagtgtagtggtaaagcttattaatggtggggagcttaactgatgtttgatgaagattttaaggataggatttcgtcgcacttaaactctaaaatagacaaagatattcaatctggccctggtttttttgctcgtaatgttatgcaggcaatgcggtatttggaagacaagcctgtagctccttcaacacgtttaatgcacatggatgagagggagttgaaaggcaaactttcaaatatttggcacattcatgtggcagaagacaatatgacaggaatgtataatttcttgaggttgaaatctgaaaaacccgagaaaaaaacaaaatgaaaaggatcttattgcaagaggagccagagaggctttgcgacaatatctgttatcaaggggtagagtgcttaaatcgcgtgaaattagagagttagctgcacagtgttctgcatgcgcagcggatacagatatggagcaatttgaaaatgaaatgcgacagtctattgatgcaatcgcgaaaaggagttttgccaaagaaaattcaatctctggagattggctactatattggaaggatgttaatggggtaaggtattatttagattctattgaacatattcttggtagtgatgttcaaaaacaaacgaatttatctaatggtcttgatgccatactttctagtatggggaaatctcgctgattgcagagatactcttggggtattgaaagaaaattatgaatataatagtcaaagattttgaaagaaatcatcatttgctttagtacatcggggttaagctttagcacatttttacatatctaagccactggcctataagccggtggcttttctatttagggatagagcatggcaactcttaaggatttatctaatcagctccagcagattaaaaagcagatcccttttgctgctgctcaggccctaaccagtgttgctcgccagattgccgccgctcagaaagtgggtatgcagcgcaatctggataatccgacccctttcaccgttaattctgttggctcgtttggtgcccgcaaagaccgattgcaggccagagtgtttgtgcgtgatattgctgccagttatctcgaaccgttcgagttcggcggtcagcacaagctcaatggtcaggcgctgcttaaccccaagaacattaagttgaataagtttgggaacttagcccgcaataaaacgcagcagctcaaggctaaagaaatgtctttgtgggggaggtgaatggcgttagtggtttctttcagcgtaagaaaggcaagaagagcaaaaaggctaagaagcgtcagaagcgctctcctaacggggtgcatagagccaggcagaagcagagagcgcctaagctactaattcagtttggtgatgctttggcagttaaaccgacgctgggatatatggaccgcgccagcgctatggcagcggcattgatgccgggtgagttgagcaaagccattcagaatgcgctagctactgccaaatgataattattcccgctcggaattttttgggtccttcctgcgacttttctaatgtacgggcattgcgcgccgcgttctgcgtctagctatgaacttttgaaatttgggtaacaggtaacaacgaggtaacagatgaatcagtcagattttgccaaacttcacgatgtcagccgcaaaacggtaacgacgtggaaggcgcgcgggtggctggttctggccggtgatgacatcgatgttgaggcttcaaacgctaacattgagcgctttcgcaaaactgttacccgaccagagaaaaaagccgcaggtaacatgcaaggtaacaaaccgggtaacaaccgcaagggtaacagactgggtaacaaatccgacggcgatccggcggagtcaccagccaaaattgtcgagaagatgattgccgagaacggcgtcgatatgaccatcgatgaagcccgcgaaatgaaagaaaactttctggcgctgcttaccaggcttgagtacgagatcaaatccgggcaggtactcccctataaagaaatgaccgaggcggtagggcaagagtattcccgtatgcgaacccggttgattgctatcgctccagaacagggtccccgcttgagggttctggcctcaaccaccgacgacgcggggtttgtgacagcactgcaagaagtggtttatgaggcaatggaggaattaagccttgataccgataacacccgaggggacagctaatttatcggcctgggataatttcaccaaagagctgtatcaacgaagaagcaatatcaaaccgcccgagccgttgtcattgagcgagtgggccaacaagtacgcggtattgtccaaagagaccagcgcgcaaactggccgctttcgttcctttgcctatcaggatggcatgatggatgcgattaccgatccccgtgttacacaggtttcggtgatgaaatcagcccgcgtcggctacaccaaaattctcgaccatgtgattggctattatctggcacatgacccctcgccaattctggtggttcagcctcgggtcgaagatgctgaggattacagtaaaaccgaaattaccccgatgctgcgcgatactccggccttaaaagcgatctcgggcgatctgaaagccaaaagcagcaatcaaactatcctgaaaaaacaatttctcaacggttcgaatctgaccctggtaggcgctaatagccctggcggtttccggcgtattacctgtcgcatcattttgttcgatgaggtggatggctaccctgtttccggtgctggggtggatggcgaccaaatagcgctgggtaccaaacgttctgaaaccttctggaaccgcaaaatagtgctgggttcgacgcccacggttaaagggatcagccgaattgaaaaagcctacgatgagagcgaccagcggaagtattacgttccttgtccgcagtgcggcgaatatcaaacgctggaatggggtggaccagatacgccttacggcatcaaatgggataaagataccgagggtaacgggctgccggataccgcctattatgtttgccgccataacggttgcgtgatccatcacaatgataaagccgggatggtgaaaggcggaaggtggctggcgacccggccatttagcggtcatgccggttttcatatctgggcgggatacagcctgttccctaatgcggcatggaaatatctggtggctgaatggttgcgggtaaaagatgacgctttaatgcgccagacctttatcaacctggtcttgggtgaaccttatgaagatcgcggcgagaaagccctgagcgaaaagaaactgattgaacgctgtgaactcttcgccgcagaagtgccggatggtgtggcggtattaaccgccggtattgatacgcaagatgaccgctttgaaattgaggtgacggggtggggcaaaaatgaagaaagctggtcagttgcttttgatgtcattgagggggatttgcaaactgacgagccttggttgcggctggacgcctatctgaaacaaatttggcggcgagctgatggcagaggttttaccattatggccgcttgcatggattccggtggtcaccatacccagaaggtgtacgagtttgccaaagagcggcttggtcggcgtatttgggcgataaaaggggaatccgcgcgtggggggaaacgctctccggtctggccgactaaaaagccttcgtcccgttcaaaatcccagttcaggccgattattttaggcgttaatgcggctaaagatgccattcgttctcgtctgcatattgatctccctgcaccgggtagcgaatcggcgggctgcatgcactttccagccgatcgggatctgcattatttcagccaattactggcggagcgttcggtagtcaaaatttcaggtgggcaacgttatcgggtctgggagcaactaccgggtcgggctaatgaggcgctggattgccgggtctacagctacgcggctttatgtggtttgctgcatttgggtttcaaactcaatcaaaccgcagacaaaattctgactcaccccgagcggttgttaccaccgccagttgaggtcgaagaaaaaaacagtctgcgcctgcccggagccattatcaaagaatcagatcctccttcacctaaacgcattgccagacggctggcataaggatttctatgttcgatgcaaacaccagcctgttggctggtgcgatgactcgcgcccaattacaggaagcattaacccgcgcgcagcaggcttatatcgagttgtcatccggcgctaaaggggtgtcgttttcttatgcacagggtgatggcactcggtcagtgacctatcaacagacagatatcagtggccttgtggggcttattcagcttttgcaggctcagttaggcatcgttaagcgtccacgcagggcgctgaggtttcgttactgatgaaaaatgaagtgaggatattggggccggatggccgcccactggcaccctcacgctcccgtgcatccatgctaaacggatcgggtggtgtgccttacgacgctgctgattcattcagcgattcaatggctaactggcaaccggcgctatggtcgccggataatgaaattaatatttatcgtgaccgggtggtttcccgcgttcgcgatatggtgcgtaacgatggctgggcgtctggcagtgttacgcgcattctggataacgctgttggggcggattttcgtccactggctaaagtggattatcgcactctggcgttgattaccggcaataaagccttcgatgccaaatgggcagatgaatatggccgcgcggtggaatcggggtggcgtacttgggcaaatgatccggggcgctatagcgatgtggagcgcaagaaaaccgtctcccagatgttgcgactggcctttcgccacaaactgacggacggcgatgcgctgtgcgtcatgcaatatcgccccgatcgtcttggtcacggacgggcgcaatatgcaaccgcgatgcaggtggttgacccagaccggttgtgtaatccgcagcagaattttgatatgccgactattcgcggtggcgtggaaatcgatgcagatggcgtgccggtggcctaccacatccgcaaggctcatatgggtgactggtggagtggtgcggcaaccatgacctgggagcgtattccccgtgaaacgccgtggggacgtccgattgttattcatgattttgacgcagagcgggcttcccaacatcggggcatcagtatttttaccccgatagtgcagcggctgaaaatgttgattaagtacgaccaggttgaactggaatcttccattctgaattccgtgtttgccgcctatatcacctcaccctatgaccctcagttagtcggtgatgcgctggataacgatgatgtcagcaagtatcaggatctgcgccgagagtttcatgatgagaagcgaatttctctgcagtccggcgcgcgtattcccattcttgcaccgggggagtccatgaccacgcttaacgcggccagacccaccagtaacttcacggcgtttgaaagcgccgctttgcgcaatgtagcggcggcactgggcatttccacccagcagttaacgcaggactggtctgatgtgaattacagttcagcccgttcagccatgctggaggcgtggaaaaccctgacccgacgacgagatgactttgccgcggggatcgcccagccggtgttgtcgtgttttatcgaagagttacatgatttaggcgaagtcccgctgcccactggtgcgccggattttctggcggcgaaagcggcgtattgccgtgcgcaatggatggggccgggtcgtggctgggtcgatccggttgccgagaagaaaggggctattctgggcatggaagccgggctatccaccctcgaaatggaggcggccgaaaacgtgggcgaagactgggaagaattgctggatcagcgccagcgtgaacgtcaggcctatatcgaacgcgatttacctatccccacctggctgcaagccgaaacctttgcacctgaccaacaacaaaaaccggaggcaccgtgaatttaccgcacttggctcagcggctgttcaataccccgctggcgctacatccgcgcaaagcggaagtggtgatggccgcgctgaccgacagattcggcctgacccgcattcagtccagtactgactggggtgacgacgatgatgaagtttttacccgcaaaggccgggataccggctatgacgtcgtggaggggattgccatcattcctattcagggcaccttggtgcagaaactggggagtttgcgcccctacagtggcatgacgggctatgacggcatccgcgcctgttttctccgggcgctggaggacaaaaccgtcaagggtatttgtctggatattgattcgcccggcggtgaagtcgcgggctgttttgatttggtcgatgaaatctatgcttctcgtgggcaaaagcctatctgggccattctgtcagagaatgcctattcggcggcttacgcgctggcgagtgccgccgaccggatcgtggtaccgcgaaccggtggtgtggggtcggtgggcgtgattgtgatgcatgtggattggtcgcagcgtatcaaagccgatggcctgcaggtcaccatcattacctacggcgatcgcaaggctgaatctaacccttacaccccattaagcgaagaggcgcagaaatccattcagtctgatgttgatgagatggggcgcttatttgtgagtaccgttgcccgcaatcgcgggatagcagaaaaaaccattcgggatacccaggccgcctgcctattggccgctgacggggtgcaactggggctggctgatgaagtggcctcaccggataccgcattccgcgatttattaaaccaagttggagaagagtaatggcgaaaattaaaggtttttctcacctgtttggccgtggtgccaaggcatctgaagaaaatgaagaggataaggaaaagtcggagaaggctaaaggccgccgcgctgaagacgatgaggatcaggacgataacgaagacgaggaaaaaaacggcaaaaaagccaaggggcgttgcgctgaaagtgatgatgacgatcaggatgaaaaagaccctgatgcagaagacgacagcgatgacgccgatgcggatgagggggaagacgatgacggcgatgatgaagacgaagaccgcaatgttaaaaaggggcgtcgggctgagcgtaagcgctgtgcacggatttttggcagcaaacatgcagcgggtcgcgtggatttagccgcttcattggcgcttcattccggcatgagttcatctgcggtaattcgcgttcttgcctcgaccgcagcggtggcacccgcagcctcaacccctcgcaagcgttctctggatgagcggatgcaggcgttggggaatgtgcaagtgggtcaggatgctgccgatgccccaagcggctcggctcaggcgctgatcagtaaaatgacgggtttgtataaccaaacggtaggtaaaaaatcatgaatgagataggacagaatagttttactcccggcgtcactcaggcggtttttgttccggatcaactggtcagtgggcctctgcaacttgtcactgataccgtcagcctttctgcgggtgttctgctacgcggtacggttttggggcaaatcacgacgactaaagcctatatccaatcggttaaaacggcgacggatggcagtcaagtaccttgcgctattttggttgataacgccgatgccacgactggtgcagttcaggctggggtttatctgatgggcgagtttaatcaacatcgggttatttttgatgacagctggacgctggccgatcttgctgtggctcttcgtccgtattctattttcctccgtgacagcctgaccgcctctaatacctaactctgtttgtctgtattgactgatgccatttctttggtagggcattgcacgtcttcattccgtccggcagcgcaggctgtcgggctattttatagagagatttcatgaatatttttgataccaatgtgctggtgcaaactgtccccaacctgaaaacctcacaaaactttttactggatcgatttttccccaatgttgtgacctctgacacagagtttgtgtctatcgatgtggatgtgggccagcgtcgaatggcgccatttgtttcgccgctggtgcagggcaagctggtagaaagtcgccgtctgcaaaccaataccttcaaaccgccttatatcaaagataagcgcgcacctgatctgcgtaagccaatccgtcgccagattggtgagcggattggtggcgagtacaccgccgccgagcgtgaaatgctaaatctgcaattcgaaatggccgatcagatcgatatggtcaaccgccgactggagtggatggccgccaatgcgctggcgtccggtaccatcaccgtcaccggtgaaggttttgacaccacggtgattgattttggtcgttctgccgcgttaaccgtcgccctcagtggtagtgacaaatggccgatggtggttgcggcaggggcaaccaacgacaagccttcgcaagatattgagttgtggcagactcaggtactgaaagactctggtgcagtcgtgaccgacctggtgtttaccacctcgtcatggcgcgcgttccgactggataccaccatcaaagacaacgccatcgtcttcccggcattaagcccgtttggcaatcagattgatgccggtgcgcgcgtgggcaaaggcgcggtgtataaaggccgttggggtcagtttgatttgtggctctataacgattggtacattgacccggttgatggggttgagaaaccgatgctgccggatggcgtggtcattatgtccggtgccgatttgatgggaacgcgcagctttgccgctattctcgatccggccttcaactatggtcccatggcctatgcgccgaaaagctggcttcaggaagatccggctcaacgtttcttgctgatgcaatcttccccgctggtgattccaagccgggtcaatgccactctctgcgcaaaggtggtgtgagatggcgaagcaaaaagatatcccggatgagtcaggggtagagatagagaaaactatccctgtggaacagctagaagggactgacactcagttagaaacacctgatggagaagatcaggaattccccggtgacacgaactctctcagcacgacggttgtggtgcttaaggggcgttcagtgaagcataacgacaagctctatctcgaaagcaataccttggttctcgatgatcttgacgatgtagtcactctgattgatgcaggttttgtcattacgttggataacttgagaaagcaagccgctgcccgcgaagcagccggtgcgccgatgattcaggttaacaatggcgttatcgtcactcaggaaggctagcgtatgggcatccactgggatcagcatcttctcgcgccactgcattcggtatttggcgatccggttgaataccggcccacacgcggtactccttacaccgtcagcggtatttttgaccgggcgtatacgcaagatattgaaccgctcgatgatggctgcaccatcaataccactaagccggttttaggcgtaagagacagtgagtttcgttcaccgcctaaacagggtgaccgggtatttattgctgtggccggtggcgtgaccatcaatacgctgttcaccgtgtcggacgttcagcccgatagtcacggcggcagtaaactgattcttaatcaggtcaaaaaaacatgaataccgcccaggtaagagaactggtggtggcggctctacaggggaataccgacgcagatcaccgtgtttattctccgcgtgactggccaaccaccgaagagatgtatccggtactgctgatccaaaccttgattgaggaaaaacagtcactgggtcgtaacgccccgcagttcaataccatcactaccgttcgtatcactggtcgcctgcaagcgtttgacagtgaactcgccgatgatggcgcggtaaaagcggagctggccttagagcggttgcgcgatcaggtcgagcgggcggtgattaatagctatgaactgacgcggaaaattcagcaattcgcgcgagtacgctccacgattgatattgattcctcgggcgaagggcatatggctcaactgctgatggaattggatattgaatattaccaaggcccggaagatttctatcctatcgatgccgagccgctggcgggtattgacgtcactattgccatgcccgatggcacaccagaaccgctggtagctatcaacctttaggagtcaattccatgattgtacaacccgtaaccggtcgatcagtacgcgatccggtgaagggcacctttttgcccgaaaccggtgcagaggttcccgacaattcattttggcgccgccggctgaatgacggtgacgtggtgcgcgttccagagccgaaagtgaaacccgcgcctgaagccacccaagtggagaaaaaaccataatgacccttccttttagccatattccgaacaacctgcggacgccgcttttcttcgccgagtttgataattctcaggcaaactcggcaaccaccatgcagcgcaccttaattatcgggcaaatgctggcaacggccacacttccacccaatgtaccggtactggtttcttctgtggccaccgtggccgggttatgcggtgcgggttcgatgttgcaggggcaaatggccgcgtatctggccaatgacaccgccggtgagatttatatcttacccttgagtgatacagaggcgatggcggcagcaaccggaaaaatcacggtcaccaccccggcatcggccatgggggtgatctcgctgtatatcgccggtattcgggtgcagattgcggtggtggccactgatgacgttgccaccattgctaaggcgctgaccgcagcaattaatgcggccacggctttacccgtgatagcgacggcggaggcgggggtgattaccttaaccgccaaaaataaaggtgctcacggcaacacgattgatgtgcgcctgaactatctgggcagtgccggtggggaaaatacgccggacagtctggcgttgacgatcaccccgatgtcgggcggtgccggtgcgccggagctggatgatgccctggctaatttgcaggatcgcacctttgatttcatcatcaatccgtacaccgatacggcgtctctgaataaactcaaagactttttatcggacagtaccggtcgttggagttacgccgaacagttgtatggtcacagctttgccgcccaatcgggcacttacggccaactgacggcagctggggaattacgtaacgatcagcatgcctccctattgggggtgaatggctcgccaacaccaagttacatctggtcagcggcttatgtcggcgcgattgcacaaagtttgcgtaacgatccggggcgtccgttgcaaacgctgagtatcgccggtgtgctggctccgccactggccagccgctttactctgaccgagcgtaataacctgctgcatagcggcatatccacggtcacggtggccgatgacggtacggtgcaagtggagaatatcattaccacctaccagaaaaacggatttggcgtagaggatgacagctatttgcagattgaaacgctgtttttgctgatgtttgttactcgctatatgcgaactcaagtgacctcgaaatttgcccgcatgaaactcgctgctgacggtacccgtttcgcccccggatcagccattatcacgcccaacgtgatccgcgccgagttgattgcccagtatcaggcgctggaatttaacggctatgtgcaggatgcgaaaggttttgccaaagggttgattgtcgaaaagagcgccagcaaccccaatcgggtcgatgtgctgtggaccggcgtcctgattaatcagttacgtatttttgctgttcttaaccaattccgcctgcaggcgtcagcataagggatcgattttatgggtgatacaagaaaccgtctggccggtaccgcctttgtcacggtagacggactgaccatcatggtggcggggcagtttaaatacagcccgtcacgggtcaagcgtgagacgttaaccggcatggatggggtacacggttataaagaaaccttcagcgccccgtttattgcctgccagatccgcgacagcgggggcacctcaatcagtgattttaacgagcagaccaacgtcagcattatctgcgaactggcgaacggcaagaccattatcggcagcggtatgtggtcggtgaacacgcaggaagtggatagtacggaagcgacagcggatattcgctgggaaggcggctcggtcacggagaactaagatgtcggaattagaacgcagtaaaacaattacgctggttaagcctattagctatgaagccaacaagactacttatgaaaccatcgaactcggtgagccggtactgattcaggttcagcagttttatgacgagcaggccaagtctggcgcactcagtgcgatgggattattaatttctctggtgtccagtgtgccgcgtgaggccattaaaaagatggctttcaccgactacaaagcctgcgaggtctacatgatgggttttttaacctactccccgccagagaacgttggttagaaacgctggccgatgtgacctattactacggttgggggccagccgatgcgtggtccctgacctacaacaggttgttatggtggtgtgagcaggctcagcggatcaacaaaataagggcagataaacaaaatgggtaacgcttttgattttgaactggtggccaacgatcaggtaacggcgactattcaccgtattgacgaggcggtaaagaaactggttccccagttggataagacccgcgatggcttaaaactgggagggcaagagtccgtcgaaggtctggatagtatcaacgataaactgcaaggaatgggacagttcgcgcgtgaaggcgtccagtttattggtgatctggtaccgccattaaaaatggtcggggaattaggtggtaaggcgttaaagtttggtggtatagccgcggccggtgggtatgttatccacggtttagccagagggctgggcgaggcggccggtaatgcatatcaactggatacggcggcaaaaaatgcgggtatgtcggttgataattttagccggatcagcggtgcgatgcagatattggggatcgatagtgattcagcccggcaatctgtagagggattatataagacgtttaatgacccattatgggcgcgtaatgatacgacacaggcattgctggctcagaacggggttaaaattgaacgactcaaagacggcacggcagatgtgtacaaaacgctggaaaacgtggcaaagatattccctaagcttgccccgcagacgcagaagacattggctgatgcattaggtctagacgaaaaccttctttcgttaatgcgcgaaggctctcaatacaaagagctgttggcaaaggcggataaattcggtttaacggttgaccctcagaccaatgcacaactcaccgagctggatcgccagttatctgaggtgagcgcagcttgggatgggttaaagcagcgagcctctaataaattctatgctgcgatattatccgatggttcagtgaaagacgggattgagggggcgaccgatgtggtatccaatggtgtagacagtatatctctttcccatttactggggtttaatcggggcgatgaggctaaccagttacgccgtggctataacgaccctgaattttataaatcattgagtgaatgggataaagtcgggttggactacggcatgatgaccgatggttatcgtaaaaagtatgagcggcattatggccctaaagatgagcaagaaaaacaaaagctagccgcccccgcaaatacgtcttacatgcttcctagtgaagatcagcagcaggcgaggttaaaacagttagagtcgcagtacaatcttcccacgactctgcttgatcgtgtctacctgaatgaatctaaccggggtaaaaacctactgtcaccgaaaggcgctcaggggccgttccagtttatgcctccaacgggcagggattacggattaaataccacagaagatcgtatggacttcaataaatcaagcgaagccgcagccaagtatctttctgatttgcttaaaatgttcgatggtgatgtcaataaggctgttgcgtcttataactggggaccgaataacgtcaaaaagcagggcttagaaaaagcacctgccgaaacgcgtcattatcttcggaagattatgccgggactacccccttatcaattgcccatcaatgatcccaatacgactggcgcacctgataaccttaattctcgcccagatccgggtaccggaattatagccaggaacccaccttctattttatcgccatcatcaaaggccagtagcagtagcctggatatcgctaatgctattgcgcaggcgatggagagcaataaaacagagatagagctgaccttgattgatagcaagaccggtggccgccaggtgatatcgggaaagggcggggccaaaatatcgacatcaatggactattgatgcaatgaaaaaatacaacctgcttcggcaggttttctgctttctgggggcaagcatgtccataattggaaatgcattatcgagtttattgggtaccagtggtgatagctggacgtggcaggatcacctgcatccggcctcatttcgcggggttccttttgcggtggtcacgggcgagggcgtttttgggcgtcggcaggcgatgcatgaatacccctaccgggacaccgcctggtcggaagatatggggcgggctacccgccgtatgaccatccgggggtttctggtgcaaagcagccagctttataacgcgccggatgtgatgacccagcgtgactccctgattgccgcctgtgaagaagcaggacccgccacgctggtgcatcctactttgggcgaaatgaccgtcagcataacggaaagcggtctcaggattaacgaaggggctgaatgtgggcgggttttcgaattcacgttaaccatcattgaaacggggttgcgcgtttttgccatcaccagttcggctgatgcggtttcctctgtcagcacatcatggttcgggctggccagcaaaaccgctactggatttattgccacggtaaaaggggaaattcgtgcggttaatcaaacgataaaaaccctgaaaaacacggcccaattttgggtgaagatggtcaatagcacggtcaatgaagcgaccaatctggggaacacgctgcgttcaacctttggcagtacccgttatggccgctttaatttcggtagcgttgggggtagtgccaatggtgcaaccggtaatcgtgttcagcaaccggatgctgccgatttctccgggctggtctcccagcgtctggcgctgacggtaacgggccgagccactatcacacaagccagcgctgcattcatcaacgcggcctcggttgaggactatgccattgccgctgagcgattggtcagcgccattatgacggatgccgtgagtgccctggatttgatccggataatggaaactctgtcatcagagaataatgacgatgtattttatgccaacagcagtgatacccgtatagcccaggcagccaatcacatgatggtcgtactctgtgccgggtcaatggtttatgccgcgtcgcagtttcagcctgaaagttatgatgaggccagtgcgctactggctcgcgtgtgtgatgtggttgatcatgccgcgctggccgctgccgataggggtcatgatgatgaataccgctcactgaacgatatgcgccagtccatcgtgaccttgctacaacaggccggggccaacttatcccgtctggaaatacagcgttttaatcgctccctgcctgcattgaatattgccaaccgactgtatcaggatgcgtcccgtagcgacggtctagtcagtatggctaatcccgtccatccggcctttatgcccacccgatttaaggcgttaagctcatgaatgacgaactgacattgagaatcggcggcaagttaatttcaggctgggatcaggtgcgggtgacccgcagcatcgagcggctgcccagtgatttcgatttgtcgttgatggatctttatcccggaagtgataaccagcaatgggttaatccgggcgatccctgtgtggtgatgctgggtcaggatgtggtggtgaccggctatatcgaccgctgggcaccgatgatcagcaaaacgcgtcatgaagtccgagccaccggtcgcagcaaatgccaggatttggtcgattgctccgctgaatggcccaataacgtgatcagtcaatccacggcattgcagatagcccagaaactggccgcgccctatggggtatcggtagcgaccgatgtcaccgatttggacattgtgccgcaatttaccctgaactggggtgaatcgtctcaggaagtcatcgaccgcattacccgctgggcggcgttgctgtactacgacctgccagacggcagtttatacctgacccgcgtcggtacccgtaaagccgccagcggcgtggcgcaggggaccaatatcgaaaaagccgcctttaactccggtatagatgagcgcttctctgactatatcggcgtttccatgtcagtcagccagttgcaggaacaggttcaggatgcgggatacggttcggtgaccctggcaagaagccgtgacccagaggcagcccggatgcgttatcgcaatcgcattattattgtcgaaagtaccatgaaggcggctcaactggcacagcggtgcattgattgggaaatgaaccgccgttacggacgttcaaaagaactgttggttaccgtggatagctggcgggacaaggacggcaaactgtgggaacccaacaccctgatcccgattgatgtaccagtttttggtttaaaggatgaactgtggttattggccgaagtgacctatctaaaagacgattacggtaccacggcgcagatggtcttgatgccgccagccgcgttcaccgttcagccttaccagttctatagcaacctgatggagatagctcactgatgaatgattcagggcaactttcccgattataccggcaagtcaagatgatgcttggggtggggcgggtgacggcttccagcgatgccggcagcgcccaaaccgtgcaataccagaccccgctggaagtccgtggcaacacgcctcgcatggcggagttcggtttttcttctgcacttcccgttggttctgatgtggtcattggttttcttggcggtgaccgttcgagcgctgtgatcattgcctctaaccatcaagcctatcgccataccggcttagttgcgggggaaacggtgatttattctcagtgggggcagtttatcaagctgacagaggcggggattattattgaggctaacaaccagccggtaacggtcaataacgctaccgaagtcaccattaatgcgaccgacagcgtgctgatgaaaacgccaatattgaaagtcaccggcgatattattgatcactgcgaaagcaattcggccaccctgaaaacgctgcgtgaggcctataacagccataagcatccggttaaaaatgtgcaagggggcagtgccaccatcaccagtgagccgcccggatcgggggtgaaatgacagatattaccaccctctggaatgttaacgaatccatcggcgactggtcgcaatccgcggggcttgggctggctgacggcgatgacctgaaaaccgccattcttatcagcctgtttactgaccggcaggcccgcgctgatgatgtgctggacgatgccgatcggcgcggttggtggggagataccgataccgagcaggccatcggctcccgcctgtggttgttacgccgccagaaactgaccacccaggttgccatcaaggcagaggattacgcccgtgaagcgctggcgtggctgatttcggatcaggttgtcagcagcatcaacgtcgccgcccaaatcatctatcccaaccgcttaaatctgatcatccgttaccagcagccgggtaaaacccagactgcggttaaattctcatgggtatgggagcaataattcatgccattcaatcgaccgacattaacggaattacgccagcgcaataagtcctatatccagtctgagttaaaaaccaccggcagtttactgcgcttctctaacctgggcgtgatcagtgatgctgatgccggtctagctcatttgcattacggttatcttgattatatcgccctgcaggccacgccatttcatgccactgacgaatacctggctggctgggccgcgctgaaagatgtgtttcaaaagccagccaatcccgcaacttgcccttccgtcttattcaccggaacggcaggccggactattgctgccggtgcggtgctgaatcgggctgatggttatcaatacatcctcgatagtgatgtaacgatagccccggcaggaacgggtaccggcagtgtaacggctattttgtccagcccattggatgatgttaccggtggcggggtggcaggcaatgcggatgcagggacgctgctgacactcgacgttgccgtagagggcatcccttctgcggcgatagcgacggtgaaaatagcgggtggggcagacattgagagtgaagatgcttttcgttcccgcatgttgctggcctaccagaatacccctcagggcggtaatgataacgactaccgattatgggcgctggcggtgccaggcgtcacccgatgctgggtggcgcggcgcttaatgggcgcggggagcgtgggcatttattttatgtgcgacgggaatgataacgggggtttcccgcaaggctccgatggcatatcgcaacgggagcaatggggagccataaaagcgaccggcgaccagctgcgcgtggctgatgctatctatcccctgcaaccgattattgcactggtttacgcctgcgcaccgacaaaaaagccgattgattttgttattgcggggatagcgggggcgggcagtgccacggttgaggctatcaacgcggccatcgatgaggtctttttcgaggaaggagagcctggcgggaaaatttactggtcatccttgctgctggcaattggcgatgtgccgggtaccagtgggtttgtccttacgtctccctcgaccaatacccaactggcgatcggcgaactgccggtgagggggagggtaacctacacatgagccgattctccgttaatgaatatacgcaggctttgcaggctctcatgcccacggggctggcgtggccacggcgaccggatggagcacaaacggcggtgctcagagcgttggctgccgcctatcagcgcagtgatgaagaggcgcaggatctgttaattgcagcattccctgccactgctacagcgttactgccggaatgggaatccacgctgggtctgcccgatttatgtgctattggtgagattgacagccttatccaacgccagcgcgccgtggtgtctaaattgttcggttcaggtggccaatcggcggcttattttatccgggtagctcaggcgctgggttataccattgaaatcacccagtaccggcaggcctgtgcgggcatgtcagtgtgcggcgatgctattaacggcgaggactggccgtttacctggctgattactgccccggaaaccacggttaatacagcccaatgcggcctgacttacagcggcgatccgctgcgaacgtggggtaataaacagctggagtgcaggcttaatgcccttaacccttctcacgccattctcaggtttggctatataaactaactcattgaataaaaataacttagcgctttcattagcgaggattttctatgcaaaaaattggcgatataccgaatacccgagcagacagtcacggtgagtttacggacggtaatgtggcgggcggagtgtctcccacgatactgccggccgaatggtttaataccatacaacgagagttaatcaatgtactggcggctggcggggtgacgcctgacaccacaaagtttaatcagctcgctacagccatttcaaaaataatcactgatggtggctttttaaaaacagccaacaacctgtccgagataaaagcagcggggcaagcagctgtcgcacaaactctcgcaaaccttggtttaaaagaagcggctaagcgagatgtcggcactgggattaatcagataccggatatgtggagttttaccagctcaatgacctcaacaggctggatgaagcgacccgatggtttaattgaacaatggggagaatcatccttttccagatcaaatgaccagtttttttatgctgacgcttttttcccaatagcgttccccaataaagttttaaatatgagtgtgacactccacggcatcaccgatatttcgataataggaaaaacgctcgctgcggatatgttagcaagaacatgggcagcgatcccactgagcaagaaaagcggggaaaacatccctacagcgcaaagagttatgtggcgcgttattggttattaagtgaggtttaaatgaattatttctacagcccagcgaataatgccgcttatccagaatcgttaaaaacggaatatcaggctgcgcaaagttggccggaggatgccgttaaaataacggacgagacttatcagacgttttttgcctgtgcttcgccagccggtaaaaccagaatagccggaaagcaaggccagccagtttgggaggatattcccgtttatgtccctaccgatgatgaattggccgcccgtgctcgccgctatcgcgatgctttcattcaagccaccgatcccatgatggtcagtgattattctattgacgacgtaccgctgacggaagagcagcgcagcgagctaatcgccactcgtttagcgttcaaacagtggccgacgctggcgagctggccgctgattgagttgccagtgattgccgggctggataaatcccgctggctactgacggaagcggtgaataatggctacgtggtgccggtgtggccgccagaatttcgttaaatctttataggccgcatcgttcgtggcctataaaaaatcactcaggctttagtggccactcgatatttggcgcagttgaaacgtcaacacgcatcagcaaaactcgatattttctccactctgtgaggtcagccttttctttttctgtcgcatctcccatatcaacagcatcctgccgccaggcaatttcagaatcagccgcctcccttaatgccttttttttctggacagcgcgatatatcaattcttcaggtgaaggcggtggtatatcaacccatactggccgtccatttaatgaccctatggtcttcctatctggtggagtagttttccagtattcattagattcctcatcagaaagtaaaacagcatcacttggccaggttttcttgttatatgtaccatcatctttccatgctgcaggtatgaatccatttaaattagcgctgtaatataccattgcatttccctcaatatccgatagcaaaaacaagtggattagctgttccaggaactgacccagaaccaaatacttgtgagaatagggtaatagaatttaagttggttgatgtcacttgaaacatttggtcgcatgaccccgtaccattccccagagtggacacgctggagaacacgcaagcagttgggaatgctatagggaacgagagtggacccatggtgctctcaccagtagaggatgggccagcaaaccattgaatgatcaatccaccaggaacatcaggtatgcgaatataatctctggtggttactgttttcggctgttgtgctgagatttgtttccattctgaccatgggcccgccccattccactcagcggtcagaccacggacaaacttcagtcctgagtacgtcgtatactcttgctggcatccataagctgattgcgtgacaagcagtgttccacttgtatttgccgggtagtgcctaccaggagttgcttgagaatcgacggattgataccaaacacccacgcttgacgtaatattaccaaaaccatttaaatctgaagtacccaaagaccctttaatagggaatccactaagatttgacagcgccaaagatggatttgcaatatccgagagattactgattttggcaagaccaccaatatttgtcagggacaaagatggatttgtaacatcagagagattactgattttagcaagagaaccaatgtcattggaggttggtttgttattgggcccgtaaaactcaacccatgatgcccatggccctgatccagtccatgcactagataatccacgaacaaatttacgaccagagtaggctgtatactcttgctggcatccataagctgattgcgtgacaagcagtgttccagatgattgaatcggataattcgccgccgaggttgccaatatgtcggtgggttggtaccacacacccgcagaggttgccctatcacccagcgcatttaaattaattgtcccaagatctcctttagatgcaaacccaccaatatttgatagggactttgaggcattagtaacatcagaaaggttggcgcttttcttcagggcatcagcagcggcggcaatgacttcgcccaaaccaaggtttgcgagatcaccggcggcaacactttctttagtcaccagccttgctgtgacacactccgattattttttcggggaaatcaacatgctgatcggctatatccgggtatcaacaaatgaccaaaacaccgaattgcaacgtaatgccttagttagtgcaaaatgcgacctgatttttgaggataaaatcagcggaaaatccaccgaccgaccgggattgaaaaaagccatgcgccatctatctaccggtgacagtctggttgtctggaagctggatcgccttgggcgcagtgtcaggcaccttattacactggtggaagatttaaagagtcggggtattcactttcgtagccttacggacagtattgatacaggaacggcgatggggcgcttcttttttcatgttatgagtgcgctggcggaaatggaaagagagttaattgtcgagcgtacctgtgccgggctggctgctgcgagagcggaagggcggataggagggcggcgtcgtattatgaccgatgaggttattgcgcgtgctagacgaatgtttgctcaaggggcaacgttgcatcaggtggcgttggttctggaagtgtcacctaagacaatttataagtatattcctgcagcggagcagggatgatgatttttctgattgatcactgttcacacccaactcaccgccatttgcccagaatttacccgcgaggctctggtcatagaaattgaccttaatatcccggtactaagggtcgtacgtgtgctgaacaggatcgtggcaaaccgcggatatccactgaaaatgcggatggataacggcccggatctgatatcactgatgctggcgcagtgtgctgaagaccatggcgtgatgctggaatttattaagccgacgcagaatgcgtttatcgaaaggtttaaccggacgtaccggacagacactggatttttatctgttcaaaacactgaatgaggcacgggagatcacagtgcgctggctgaatgaatacaacaacgagctgcctcatgaatccctgaataaccagacaccggaagaatacctgttgatggctgaaaaactggaagtctcaaaaagtgtgcgaaactaaaatgggtgtgctttcacaagtaccgacagagtccagttaattctctcttacaacattcgctacaaataaacgggaagcatatctggatttacatggagatacggtgagagctttaatacttgtaaccctgccatataaaaagttaatattcagacaggatattaactataaaattagggatatacatggctaactcaatttatttaaccttgagtggtaataaacaagggctgatttctgctggttgttcaagcgtcgattcgataggtaataagggacaggaaagccatctagataaaatattcatatacagtctttcgcattcaatgacaagggaacaaaatgcaagccaccatcctatcacaataaaaaacctattgataaatcgtcaccgttacttgcggttgccatctcagataatgaattattaactgcgacttttgattgttatcgtactagccaatcgggggctcaagaactgtactacagtatttctattactgatgcaaccatctcagatctagctgtatttcatccacatagtgtgactcatacaggttcagaacctcaggaaacaatttctttacgttataaaagcataacctggaaccatcatattgcagggacaagtggctatagtatttgggatgaacgagtttactaaatagcggactgggaaatttatgatttgtagtggataactttcccagtaactaattaaacgccgatttttcttcttgcaataatatatggtgcagcacttaaataaccaaaaactagagatgtgtactgaaggaattcgttgttacttatatctattttaaaaataggaataacatcgaaattcgaaacgtaaaagtggaataatggcgatattgacgccacagcaatagctgcaaattgactgtaattatcgttggaattggcaagttttttaattattggatataaaataaacaatactgctgttgataaggtaatatataaaaaatccatttatttaacccttgtatgatagatattggccgtatgcagtattgtaatcgcccactatctctaaaaaaatatcgccagcagtcattagtcttatccctttcttagttaaaccagtgataaggtctgcatctatatatctaaataatctctgtaggtctggttcaagtctatatccgaataggctatttaatgaaactgatatatctacagtggagtaaagtacgtctgcaccagattcatctatattgagaagttgttttgctaggccacgatacacaaatctcaccgggccgacataatcctcacgataaagaagataataaccattctcaatagtgttattaaaaccatgagctagcatcaacccgccagctggaccagtttcaattagtccaaggccagccacagtttgtaaaccgccagatacaaaacctatagcagcgattactattttcttattttcttttattttgttcttattgaattcttctataacctctctctttaaaattatagcttgttttattctgttgcttgttaatattctatcttgttcttttaatgacgcaatttcattatccaatgcagaaacagcttcaggtaatgaaaactcaccagtattagtcttcgctataatatcagaggaatatgctattacctcggagataaatttatctttggctaaactccattttatatacttattggcaacgttgttcattgtctgaagaagctcattctgcttatttgcaatgatgttatttagccggttagattctctttgcgcgctatcaccatatccagtagcccacgggtggcgttcttcaaactcctcatatgcatccatatcgtctgatccttgacttatttttagataaattcaattacattatatagttacattagcttaattgtaagccctccaaaaataattgaaattttcatatgtgaaagcggcattttgcatgcctgaataactgttcctaataccgctacacttttgcctgaccatgtttcccaccagggaatgggcttaccattttcataaagtggcgcactttgttcagtaattgccacatcgaacgacaactgtgatttctggttatcgtgtcatgtaatgcttgccataatcgctctatgtggttgacccgcggcgagtagactgtttgataaataacaataaattttggcttcttcaaccatctcagcgtttcacggcttttatggataatgtagttatctacgatcagtgtgatagtttttgcccgcctataggtacttttaagatactttaacaggctgataaataaacccgattttttactgcaacaaccgatgtagctgacttttcccgtgccacgcaccggtcagataatatttttcattttgccccggcgtgacaacgcgtttttgctggcccgccgttgccagtcggcaccgatttttggttgagatggatattcacctcatcctcgtaaaatacgggattttcggcgtacatcctgcaagcgcttctgcgatggcggccattttctcttctttatgcgggtcgcgaatacgcagcgtgggtgccgctctccgccagaccagcccggcagagggaagccagcggcgtaccgttgaagcatgtagatgacagcctgttatctcattgatttttagtgctaacagttcagtactccagcgaaatcgctgataaccaaaatctcccggcgagtgtttaatcaactgacgcaacaatgcgcaaatatgctcaaacggccagcgtcgtccgcgccctgagggcaatgatttcagacctcaaataccataaaccgtgaaccagttaatccagcgccccaatgatgaacgcacgcagcaaagcgtttttgcaacgtcgctgactttgtcaccacgatgaagcatcaacatagcggtcagtctgcgggcatgatctttgtcgcgtgtttgatgaatagttttctgtatcaggcgtctttcgtcgcggggtatcgatgctatgatcggtataactcagtccggttggtggtttgggatattcagcgattgatcagatcgcttaaatcggactgaattcctttcgagtgatctactatttggaacagctatttagactggcgctgttttcagggaggagatcacatcagccggtgggtgaaatcgagggatcagaataggcagaatgtatataacgaatccgggctgaattgcccggactaaaaattcaaagttctgaaaccagccactgatcggcttcatcaaacatttcttcaagcaggcggttaaggatggctttatcacctttgttggcattggtattgataccgttcgcctgcattggcttaaccttaacttctgccttagggaatacacgatgtattcgcttggttagttcagccaggatcagaccattagcacccggtatctcttccacatttcgcttatggtaaaccagttcaactatcatgtttccacttcgccctgtgactgtttgcatatacagtggggagttctatcgcggttgaaaagtccttctgcaaaactatctttcttcacttaataatcaatcggttataagcgccacttttaattgtgttgagcgaataaaaaaagccgataaccatctatgaatcatgtggttaccgacttttggtatgtctactgctgcgtcatatgggctggactgaagccgctgatttaatcattaaaggcactgaaggcgcgattcaggccaagacagtgacttatgacttcgaacgtttgatggaaggcgctaagctgctgaaatgctcagagtttggcaacgctatcattaaacacatgtgatattgacagtcagctaaatatgaacgggagcttgatgctcccgttgtttattgtaaaggttgcaagttttatcaaaacattatcaaaatccccataaaacaacgttcatcagactgcaatagtgatcccgtctttgcctctgtcatcatggtaacgatcggtctgtttctgtgatttgtggcccacagcaactgggtattaatcccttgcgcgctgtacagccgttcaaaaagagagcgcggcttgtgaaatgttgcaggtgttcctgatccccaactgatattggctttatcccttgctttgctaaaattgtcgtcaaagtattaccagtgacctgagcaccacgtcctgccatggatgtcgctcggaagtaatgcaccaagtactggtttattgcgtaatccctgcagcgagccaccatgtcacgcaaggatatattcagcgcctcatatcgtattgaaaggggaatggccaacttagcgtcagttttctcttggataatatctaggtggtcatcctagatatcgctaaattattatagtaataaaatcaggcgatacataaccaaaaatttctttcatcaataattgattaaccaataagttttatatcaccgaaatacactaccagaatcatataaaataattaacgggaaggcacgggaatggatatagtctaaaacatcacttaaatggccctatcaagaataggatcatgaattaataaaaaaacgatctactcaccaacagattcactattggtttgttatcatgaccctcaagttttattaaaattcatccttgtattttgttttaactacatagctgcaaggataaccactatttcatcaatataaaataatggagccagcatgaataataagttattattatttttcattataacatcaatatattctagcaatgtgaaacctcaagatattatatatgaggcggatatagaagcatcaacacaacctcaaaaaaaaacgtcaacacccatttgtttttatactaatgataatttccaaggtgaacatttctgcctaaatacatctgaaatgatagatctttacaatactgataataaacatctgaatgataagatatcttcaataaaaatacctaaaggaatgcaagccgaaatttataaaaatgataattttaatgccccttactataatgttacggaatctattgatttagcgcgactagaaaaaatcggtatggcaggtcaaattagcgcgatgaaggtatttgaagcgcaggctatttgcacgaaaaactgcgttattatagaagaaagtaaaatagaattaaaaaaaataataaaagaatattatccaaaaacagaagatgtcaataaaattttattattaaatctcgaagttaataaaaaaagcagttttggtatacagagtgttaaccaaccaaaaattataatcgtgggtagagatttgtttttttatggtgaaggaagtaagaatcctattaacatgaggttaagcgatgatacagataacctatcctttcttttaaaatttaatgatcatggtttacaatttcaatatcttgaagctaaaggaacgaaacaactcaatatcccattttggttcaatacccaattatcacctgatgacttagcaaacttatacatcagcaatggcataccggaagatggccaagatcctgctcttcagagcatcaacccgttaatactgaatagagcgatcatcgccatcaacaagcccccccaccgtgataaacgaggcgctttaggtattattggctgtttaggtaaccctctgctggcaatttataattatgtggttcaagggcgctgcaaccagctcgatagactggtgggaatcaacgagttttctcactcagatggggaagggaaaacatgggttttgaccgattcagtcacgccattacttgcgccagagcagccccccaacttaccagcagataatccccgtcaatcaatgttacaattagccagtcttaatatgcagttacatcatcaggcacttactctgccagcggtggcaaaagcctgtaaaacttccattgaagagattctatctgcccgttatccaaggcagacaggcattcgctgtggctccacattatcgaatctgctggcagattttacattgctttttggtgaaaatattattgattggaccaccgcaaatttggtccatgttatacagcaaattaatgaatatgggactacgggctatgccggatctgaccaggagacggaaaatcggttagttgaaggtgttcaacgggcaatttctactctgggaatcgaaccattaatagcaatgctgcaggaggctttcgattatgcacaattaaattacgcacgttattttatgcacagtgaaggtatcaacagtgaaaatataaataatgaaagtcgagagactacagtctcacctctagccgcacaaagcctaccactaggcgattatattttacctttagagagttatattcaccctcaagaactcccgacaccattaattagagacaataatcagtgggttcagcctgaaggtctatattttgaaattaccgtgattcccggaggagatcagcatgtcgagacgaatttaaccgaagaagtggccgaggttattaacgattggtttaaattctataatcagatgaaatatgaatcagatgaaacaagatcacctttaactgatagagatagaaccatttatgccgccaaaattaccagccatatgttagctgatcttttgcatgacaactctgccgattatcaatttgtagtggttaaactaaagggaaaaataatcagtgtattagcatcaagaaatgatgagaatggcgaggatagctacattagtgtttctataactcatccacaatatgtattaaaaccgcatgaagagggtagcgttcgaggggcaggaacggcggcggtaagagaattagcgcgctatctgaaagaaaaaggtaaaaagacacttaaatctagtgtcatttctcaaccctctgctattgtcaaaagcaagctgggattccactatcagaattctttatgataattatttattaaaatagactaaacgccaccattcattatccaatcaggtggcgtcactccatcactattttaaattaatccacgctctctaactgtggtggaaattaattgaaaaggtgagaggaattgccaaattaatacgcaggaataacaatgggaacttttgcctcattgcttgaatccgggtgagcgttctaaaagaacgctgagagtaaaatcttacaaatatcgttccgcctctttccgggggttccctttgccgttgttaccggcgagggggcggacggcgtaatgccttcttgtgtactctttgccccagtagtgtggatcacagtctaaaattaaggtcgccatcagggcatactaaagcgagttgataaactctgaaatttcactttggtaaagggatcgccgcaatgcacagagaacggcatagtatagaaaagataggctggctccgggctgcagttctcggtgctaacgatgggatcgtctctactgcaagtttgttattgggggttgcgtctgccaatgcaacacatcaaagtattcttttgactggtattgcaggtctggttgctggcgctatgtcgatggcaacgggagagtatgtctcagtgtcttctcaatcagatactgaaaaggccgccttggctgaagagcaagcagagcttgatgctgattttcaaggtgaatttcgggagctgacttcgatttatattcatcggggccttaatgtggcactagccagacaagtggctgaaaaattgatgaatcatgatgcgttaggtgcacatgcgcgtgatgaattggggatatcagaaatcactactgcccgacccttacaggcagcgtgggcttctgcagcgagtttctctgcgggggcgatattgccattactggtagcggtaatctcttcggctagctgggccattccagctattgcgctatccgcattggtttctttggctattttgggggggattgcggcgaaagcgggtggagcaccaatacgttcaggcgttatccgtattaccttctggagtgcgcttgcaatgggtgtgtcatcgggtgttggtatgttatttggttcttttattggctgagaacagaactgtgcagcgttttataaggaatatctgacgattaaaagggggattttaaatcctctaatgtttacttaatttaatagggataaattaaagtatcaacattcagagggcgagccatgaacagaaagtttgcacctggccaaattttattccattgggtcatttttattttgcttgtactcacttatgcagtaatgaaattaaaaggatttgccataagggcagtaatcctcgtgaatccatgaagagcattcattatacactaggtgtcagtgtcctgattttaatgctaattcgcacaatactaaaattgacaaataaagatcctgatatcactccaaccgcaccacactggcaaattgcagctttaaaaaccgttcatggtattttgtatcttttgtttaacagcttgccatgacttggtgttttgtctctgcattatggccatgtcgaatgttaattttctcctccgcgataccgatcgcggaggagaaaatagtattatgcagaataacttaaaagaaattcatgaacttattgccaatacgggctacttcattattggtttacacgcggcggcagcaatattttatcactctattaatgcggagtaatacgttggttagaatgttgccagaaaagcactaagttcatcaatgtgcctatcaggtcatatgggattagcggatactgctattttgtttcaggagcaacgcgcagagacgtggtgctactatcgttcatcacctcgtatacctgtctgaacgagcagacggtaatgttttgcattcttatgacatacgcggcaattcatgaaaattatttatataaaattgttaattttaagcaaaattgtcggattgctcgcattgttctacagttgaaaggagctaatgttttgaaagggaagtgggttaggctgataaatgaatgcgacccctttttattgacaggtaatttttgcgggtgattggatgattcatgcattttctgtacttgaagataaatgtaggacaatacctgcttgggtaaaatcgtttcgctatatatcatcagataagcgtgatctcagggttgatctgctgcggggcattgctctggtaatgatggttgcagcccacattgaagtgatgtcgatattgaatatctttacctgggagcgttttggcctaacaaccggcgccgaagggtttgttattctctcgggatttatgttgggtgtgatcaatcgccagcgcttaaagaaagacgttcttctcactataagctattcattatatcgacgagcagcaaaaatatatgtagttaatgttgtgattatacttagtgtttttctcttaactaaactcaatttcataaaaacttttgaagtaacccattttactgatcgcttttcagaagtaagttatacgctatatccactttacgaccagctaaaagaatcctggtttaatatggtgctctacttacagatcgggccccatcagagtcagattttgggcctgtatttctatctgttgctggtaagtcctatctttatctatttattgcagcgcggctgggtaggtgtattgctattgttatctctggctttatatatcacctaccacattaccgggatacgacttacatcggcggagtttgagtttgcttttccatttttggcttggcaatttatttatgtcttagggatgacgattggctggtacaaagaagagttgctctctttagcccgtactcaggccggattttggattttgtccgttatgatattatttacgctggtaatgatgtttattgcgcagaatcataccaacccatttatgccctatgacacaatgctccatactataagtgcgaaaaacttcaattggttctatcagaactttgctgaaaagaatgcgctgggtccactgcgcattatcaatgatttcactctactaacaacgtgttatctggtgttgagttacttttggaaaccaataaacaagatgtgcggttggttcctcataacactaggccaacattctttgtatgtttttattatccatgtgtatgtggttttattggttagtcaggtagtggattttggcctatggcaccgagcatggttgctaaatacgctggttcatctctgcgctttaatgttgttatggctatttgcaaaatatgatgttggcagaagattcattcctaactgatttgtattttttcgactcaatcttattaagaggtcagcagtgaaaaatactccatctactctagataagaatcaaattactaaactacgtaattgcattctttatgaactgaaatattctctcggggtggcactgtcaacggcatcatccagtgaaatttttagtgcgttagcattagttgtgcgacgcaaccaaactgatgattattttaacactcgagaacgacatcatcaggcaagaaaaaaacgtatttactatatttctatggagtttttaattggtcaatctttgcgaaataacctaataaatcaagggttgatggaaatagccaacgcagcgttagaatctcttggggtagattttgaagttattgtaaaaagtgaagaagatgcagcattaggtaatggaggattaggacgtctggccgcatgttttattgactcaatggcaaccttggatattgctggttctggtcacggtatcaaatacgaatatggcttgtttcaccaacaaattcaggatggacaacaagtagagaagcctgatgattggcactcgacacactcaccttggctaatagaacatcaaagtcaggccatgataattccgctttatggccgcatagttgaagtagaagaccagcagggaaattacaatccaatgtggatggattggaaaataattattggagtacctcacgactacctagtctctgggtacattaatcataccgtaaacgcgttgcggttatacagtgcttgcgcttcagattcatttgatattcatatttttaatcatggcgattatttgaaagctgttaatcaaaaaatcgcatctgaaaatatctctaaagtgctttatccctccgatgaagtgttggcagggaaggaattacgtttgacacaagagtattttctggtggcttgtacattacgcgatgtgatgcatgatttcttcttactttccaatgatattaaacagttaccagagtttgttgccattcaacttaatgatacccatccggcgctggctattgttgagctaatgagaatattggtagatgaacatactgttgattgggatatggcctgggatttgacacaacgggtttgcgcctacaccaatcatacattaatgccagaggcgttagagaagtggtcagtcaatttattcgagctgttactgcctcggcatttacaaattatctatgaaattaatcgccgtttcctactggaaatacagagatggcgccctgaacggtcggatttattagtatcaatgtctttgatcgaagagacgcctgaaaaaaaagtgcgcatggcctatcttgctattattggtagtcacaaagtgaatggggtagctaaacttcattctgaattaattaaatctaatcttgtacctgatttttattatttaatgcctgagaagttcaccaatcagacgaacggtgttacacctcgtcgctggattcagcaggctaatccccggttatcggcgtttctggattgtcacttaggcaatgaatgggttaccgatctaacactcctgagtaaacttaaatcgttagcgaaccaacgtgacattattgctgaactggctgaaataaagaaatttaataaattaaagttaagtcagataattacgcgtcagcaagggattatcatcaatccagaagctatgttcgactgccagattaaacgaattcatgaatataaacggcaattactcaacatcctctatgtgataaacctttatcacaaaattctgaacggaaaagaggttatttcgccgaaagttcatatcttttcgggcaaagcggctcctggctatgcaatggctaaattgatcatccagttgattaatcaagttgcgctgaaagtgaatagtgatcctagagtcaatgaacaacttaaagtggtttttttagaggactataaagtttcactagctgaaagtattattccagccgccgacttatcagagcagatatcaactgcgggtaccgaagcctcaggcactagtaatatgaaactggctatgaatggtgctttaactatcggaacgttagatggcgctaacattgaaatcagagatgctgttggccatgaaaatttctatgtttttggcttgtccgcagaggaaattgctgagcaaagaactagagggcgatcgtcgtatgacgagtatttatcccacccagaaattaaagaaactgttgatttactgatttcaggtatttttcatcccaataaaaacctgttttcaccgatattccatatgctggtgagtcacggtgaccactatttccatttggctgattttaacagttattgccatgcccaatatcaagtattgaccgactatagtgatacttacagttggcacagaagagcattgaatactataagtggtatgggcgagttttccagcgacaggactattcgcgggtacagcaaggatatttggggtgagggtaattttaagtgaaatattacaaaccactcatgctattacttggttggctacttttcagtccacccgtgattgcgagtgaaacaactaacacatccgctgttaaattatttaccagcccttggtctcgtcttttttctggtaatgatgacacattttcgacggcattaacctatagctcgccattggaaaaaagtctgattaatgttcctacagggagatattcttcagaagaggtatacaaggtaaatcaacgggggctttttagtatgcagtattcccccataagttacttttttgccaatatgacaattcgcgtcccattgcaaaatgccagtaaatacagtaccgattacgtttatagtttcggttatgatgattggcacccaggaactttcagtctggtctatggcaattacaacgataataatagttttttcccggcagcaggaacccagagcactcgatttgaacaaggttcatggacgttgggttataaatttaccttacctaagccggtagaatccgcattattgattaacaaaagtgatgcgctagtttgtcaggttggctacagttatgtaccacgttatttctctgacgcttcatcaagcattgaagaaaataaaagtagtttgctaggaagttgcggttataccctcctgcagcactatttcttacgtttatctgcattttactaccctgaccataagcagcaacagccgtgggattatgattatacctacagtattggctatacgtcgggttatagccccggttcctggtcaattcattatgataactataccgggactcgctacccgtggcggcagaatgccaatgcgaactttcgtagtgggacaataaatctcagttggacattacctctataaattgaaggcgtaagaatctgtgctacgcttaattacgttgttaatagttaactgagcataatgtcttttgcaagtatgaaagttcatggacgtgggcattctctctttaagatgatgcttgataaattaagtttatatgaagcttttgggtaacttatgcaaccacatccttccgctacaggtgtgacatccattcttgttgttgatgattcggcaagttatcgctttttactggttaacctactaagaaattggcaattcactgtttttgaggcagaaaatggtcaagacgctttggctatccttgatagtaattccatcaatatggtgatcagtgactgggaaatgccggttatggatgggttgaaactctgtacaactatccgaaaacaatattccgatcgctatatttatttagtattgataaccgtgcgtcaatccgtcgaggatttgatcgcgggattagatgcgggtgccgatgattttctgtcaaaaccgataaatcaaagtgagctacgcgcccgattacatgcgggtgaacgtatattaatgctagaggcaaccctcgatgctcgtaatcagaaattgtcccaagcctatgaacaaatagaaaatgacttgcaggctgcggcaaaattgcaacgtagtgttttacctgcagaaaagctaatggtgagtggttttcaagctgaatggatgtttataccatctgcttatgtttcgggtgacttgttaagttttttccaactgggtaatcaacacattggtttttatagtattgatgttgcagggcatggtgtggcggcagcgatgctctcactgtcagttgcgcgccaatttcttaatgggcgcacggtggataacttactgatttcgcccgcagataccccctctggttatctgattaccccgccacataaagttgtcaacgaacttaatcgccgtttttgtatagagaatgatgatatagccacttatttcactcttatttatggcgttattgatgttcaaaccgcgaccggagtgctttgtcaggcagggcatccgacaccttttattgtcagtagctcaagtcagattacgcccattggtgaaggcggggcaccggttggacttattgattcgatggactatcaggacacggtgttcactctggcttcgggtgatcggctctatttattcaccgacggtattattgagtgtgaaaatgctgagcaagagctttttggagaacgacggttacaagaattactggccgctagtcagcgcgacagtgtgcaaaccgtttttaggcaagtacagcaggcattgaaatgctggcatcctgcgcaaaaaaatgaccatcagagcgatattcataatggacgttctgcatttagtgatgatatttcgttgctggtaattgagcgtaataacaattcccttctcctaacagaattgtaaggaagaaataatgaattttgaaactaaaacaattgaaaatgtattagtgataacccccttgattaggcgactcgatgcatcagtttcgctgaaatttaaagaagatatacaagcaatgattgcccgaggagccaataatattttattggattttagtcgggtagatttcatcgacagtagttgtttaggtgcactggtttcgttgttgaaaaccttaaatggtaaaggtgagttggctatttgctcattgaataacaatatccacggaatgttcaagttaacccggatggataggatatttactatcggcactgatcaacccgataccatacagcagatgaatttcgtagcgccttgatttatagggagtaaatatttatgaaagccatgatccttgctgccggaaaaggaaccagagccagaccactgaccaccatattgccaaaaccaatgatcccattaattcgaaaacctattatggaatcaattattgaacatttaagaaaatatggttttaatcagttaatggtgaataccagctatctgtctgcggacattgagaattatttccgtgatggccatgcctggggagtggaaataggttactcttacgaaggtattatggagtgtaatacttttgttgataatgttttggggtctgccggtggaatgaagcacatccaaaatttctcaggtttttttgatgaaacctttgtagttgtttgtggtgatgcattaattgatgtggatttcgatgaggtattggcattccatcgagctagaaaaagtttggcaaccttggttatgcgcccagtctcggcggatcaggtaaacaaatacggtattgttgttactgatgagcagggtagagttagtaagtttcaggaaaaacctaaaaatgaagatgcattatcaaacaatgccaatactggaatctatatttttgagccggaaatattcgattatattcctgatggggttgaatatgatataggtagccagctgtttcctaaacttgctgagttaggtgttcctttctacggtattgccttgccattccaatgggttgatattggatctctacaagatttttggcatgtcaatcgcatgatccttaatcaggatttacctgattatcccatgccgggaattaaaattgcgcctcaaatatggtgtgggcttaatgtcaaagccgacttttcgaccttggatattgaagggccagtctatattggtagtagcacagaaatacaatctggcgtgacaattagagggcctacaattattggcgcggggtgtttattagagcaaggtgcggttgtcgaacaaagttttattgctgattatactcgggttgggggcattgcacatttgtatcaacagatgatttttgccgggaaagttatctctccagacggtacagcaattgatttatctgaagcgggtttacactggcttattgatgataaacggcgtaaagatattattatggcggagaagtctttatttgaagaattgctaaataaagatacgttgatatgagttatcgccactatgactcacaaggttggttaatgaaaatatgtttgcctgcatcattatctagcctgcttgttttacatgaaaagttaatacaattcattcaccccttagagattgattcgtccagcagttatgctatggaacttgcattgaatgaagcatttatcaatattgtaaagcatggtgttaattatgattccactcaaaatattactattataatgcaatatgacaatcatcaactagccgtgactttacaggataaagggaagcctatacccacagaatttttacaaaataaaagcggattatctcatatgcctgagttgttagcgccggattcgtggcctgaaaacggtatggggttgatgatgatgtttaatgctgttgatgacatcagttatacagtaaaagagggagtcaattatctatcgttgataaaaagaatagaagagaagacgtgaaaattatgtttattcataaaatgatgctcctttaaccccccggcaatgggttgatttatctcacttattttcctggattgactgaggtagtgataatggctttttatttctcttcgtttgaaaacaggaaaccaccattaccactgaaaactcattgggttactgagtttttatggcaaagtctggcggttgctgcgtttatcttgggggcaaactacatccgctggcgctggatgaattcacttaattacgatgcgctttggtattcaatccccttagtaatggccgaaacactggcttatattggttctattttatttaccataaacctatggaaagtaagagatattcctgttctccccgcacctgaaaccatcgatgactgtatagctcctgaagagaagcaagaaaatcgccagataaaagttgatttgtttattgccacctataatgaaaatgtcgaattggtgcgcttatcgattcgtgatgcactcgccgtcagctatcccttccctttagattatcgtatttatgtattagatgatggtaatcgaagcgaaatggaggctgtcgcagcagaagagggagttaattacttaagtcgggaaaataatattggatacaaagcaggtaatcttcgtcatgggctggatatgacggacggtgactttgttattatctgtgatgctgatacacgagttttccccacaatattgacgcatactttaggatattttcgcgatattgatgttgcttgggttcagactcctcagtggttttatgatttaccacagggcaagcgattacctgaatgggcaaagcaaaagctagggtcgacaggctattttgtcggtaaagggattgagaagttggttggcccgctcaccgtggggcatgatcccttttttaatgatccgcaaatgttttacgatgtcattttacgcagacgtaattgggctaatgcggctttttgctgtggtgctgcatcaattcatcgccgtgaggctattatgcaagctgcgttacgtcgctatgtagataatatagaagatgagattgagaaatatacaagtgacgtaattgataaacaaacccaggcagacttggctaaagcaatgttacctcatgtggtacaagataccgagctgatgccatataagtttcatgtttcagaagatatttatacctctatcgttttgcatggtgatcctggccgtaaatggcgatctgtcctgcacccgcaaatagaatcaaaaatgctctcaccgcaggatttattgacttggatgatccagagatttaaatatgcagctggttcaatggatattgcgttgcatgacagacttttctccagtaagaggattaagctcagcgcaatacaaaaattaatgtatgggactactttctggtcctattttgcctgtatctggaatacggtatttttgattgccccattgatttatcttttcacgggtatcccccccgtttcgacttattcatctcctttttatttgcattttttgcccttcatgattgtctctgaattagcatttatgtttggaacatgggggatatccgcatgggatgggaaatcgtcttttcttgctttattttctatgaatttacgagcattggatacagtgctccgaggagagaaaatcaagtttcatgtgacgccaaaagaacgtcaacagggcaattttttatccttggttaaacctcaactcgccattattgggctgacgttattggggttgatttggggagcgattcagatagccgaaggcaacataaaagacccctccggctttgtgatcaatatcttttgggggggctgcaaatattgcagctatgataccgattgttttagccgcgctttggcaacctgagtatgctgtgcaggaggtttcctgatgtcattcaaatataacctccttaaggcgcgcagttatctagcgatggtgatcggtattttaatcgctttctctattgtgttgtatgtcgagaaaaactctcaagatatagaagattcccgtgtccatatcagctccagtattggccgaccattagcaccgactcctcgaccactgacttccgaagaaataatttgggctaaggctgcatggcaatattttattaataatactcagccgagtggtttagttaattccgtggataaatttccatcgtctacaatgtgggataccagtagttattttatggcgatgatttcagcacaacgaattggtattattcaacaggatgaatttgatacccgaatcagcaatgcattaggtgcattggctaaattaccactatttgaaggcaagttgcctaataaagcgtataatacacagactctgtctatggttaattatattaatcagcccagtaccaaaggtataggttggtcggctattgatattagtcgaatgatggtgccattaaatatattagtttggaattatccccagcatgctgtcgaggtcaataaggttatttcgcgttggcaattggaagcgctagtggccgatgatcaattacaaggatcggtagttgatgataaaactcagatcatttccttacatcaggaagggcgtattgggtatgagcaatatgctgcacgaaccctgcaactggttggtattaatgctagtttagcccttgattacactgcacatctacaatttattaaagttgaaggaatactggtgcctgatgatgatcgtatctcgcaaaaagagggggcgaatacatttatcgtcagcgaaccctatattttgacaggtttggaactgggttttgatctttattcatccgaattagcatggcgggtttttaaagctcaggagaatcgttttcagcgtaccggtatatatacctccgtcagtgaggaccatgttgataaagcaccttactttatttatagcacactgcattatgctgatgaagattgggctgtaattacggataaaggcgagcgcgttaatcagttgcgacaattatcaactaaatcggcatttagttggtatgccctatggcgcacaccttatagtgaacagacacgaaatcaattaaatagcttgatggattcgagtaaaggttggtatagcggaatttatgaagttaataataaaataaatacttcactaaatgccaataccaatggcgtggtgttggaaagtttggcttttatcaatggcggaagactactttgtgctgcctgtactcaggtgatgcaatccgttggcgcaacagataaacaactaaagtaggaagattttatgatgggaaatcagtcatttttgataaagataagtctcattcttaaggctggctgcttaatgttgattctttcgctcatgccgtcttttaataccttagccgaattaccgggtgataaattagctgctgaaaactaccctgtgcggcacggtgagttaacgcccagagagatggcggttgcagttaatgcctggcaatattttgtccataatttacagcctacaacagggcttgttaatgcagttaataattatccttcgaccaccatgtgggacagtgcatcttatttggcagcgctggtttcagctcgcgaattagggattattaataaagaagaattcgatcatcgtatgttaccatttttgaaaacactgaataacttatcgttatttcaggggcaattaccgaataaagcgtacaacacaataactgctgaaaaagttaactatcttaataagccgggtgagataggattttccgctattgatactgggcgtatgttaatttggttgaaaattattaaagaacgttaccctgaatatgctaatagtattgataacgtggtattggattgggatttctcacatgtcatcgatgattgcggtacgttatatggcgcgatattagataaaaataatacgcctcagtatgtacaggaagggcgattgggctatgaggaatacgccgccagtggcttccaactttgggggttttcaacctgtcaggcatcgcgacctgaaccttatgatttggcaaaaatttactgcgtattagtgccttatgattcacgggacccacgcactaataaccaacataactatgtagtgactgaatcctatatcttgcatggttttgaaatgggttgggatcgcagtgatgatcgggccaataaagcaggaagctacagtcatccgtggatgaagaactttgctaatcgtgtctatcaggcacaggaaaatcgttatcgtgaaacgggaatactgacggcgcgttcagaacatcagttggataaagccccttactttgtttacgacacggttttcgccgatggttataactggaatacaatcaccgaccaaggtgtttttgtccctgaaaatgcggcagtatcattaaaagctgcgttaggcatgtgggtattgtggcattcgccctataccgacaggctatttgatgcgatagagaatgccaatgtgaaaggattgggtttcaacgaaggactttatgagaatggacatgggccgataaatgaatttacggcaaataataatggcatcatgctagaagccttgttatttaaaaaagaagggaaaatacttcgcttcaccagtggtgatcccagccacagcgactatattccgtcgctgtgggaacggcagttaattaacgggtttgacacgaataacagcaaacgaaataggccatatattgatgcaactcctagcctgaaagcattttgtgatcaatcgggcatcgcgatacgtaaagcaccaaattgtaagagctgccagtgcgctcagtgtcaagatgaaagcagcagcaataataatttatttaaattaccggcagcaacatcatgcgcaaaacagtgacgtctgccgctattgcctgggttattggtgctgggctactgggtgctgcgtttacgggcggtatgtttgtggcaagcagtattactcccaattccgttgcctattcagcccgtagtggtgtgttatcagataatgagcaattatgggcgaaagtcgcttggcgttactttgttaataatacgcaaatgggcactgggttggttaattcgttggataattacccggttgttaatttctggcaaatcggtgacacctttgttgcattaaccgccgctgctcaattaggcctcattaatcggcaggagtttgatcagcgcctttcactcttattggcaacgatcagtcaattacctttggttgaggggaaaacgccaaatttgctttataacactgtcaacgggcagatgattgattatgctcatcagccaaaaccgttggggtggtcggcacaagatatcggccgcttaatggttggtttgaaagttgttgcacgtttttatcctgaatatgccgagtatctggataaggttctattacgatggaatttttgtcagattattgatggtaacggtgagttactgaaatcgtctactgttaatggccaatttatcgccaagccagaaggcgtgttgggttacagcgaatataccgcaggcgcatttgggctgtgggggtttcctgtaggaatatcagctaatcttccttataacaccacgttcatttatggcatccccatcgatttcgatatcagagatgctcgaataacctatgtacccactattgttgtcagtttgccttatttactgacagcgatggaattaaaaaataccccaatatttaaacagcagaaaaaacggatagataatatttatcgagtacaggaaatacgctggaaaaaagaacatatattgacggcgcgtagtgattacttgacctcggttgcgccctatcacgtttacgatacggtgttcgctaacggttatcattggaatactattagcgaggacgggcaatttcaccctgatttggcattggtatccacccgtgcagtttttggcttatgggttttgtggaatagtccttataccgatgcattaatgaagttgactcaaatgcagcatgatgaaaaacgcgggtggtatgaagggcgttatgaaaataatggcgcgtataacaagacaattagtctgacgaccaatgctatggtcttggaaacgctgctctataaagtggcggggagcttaattaataccgatcctactgcgggatatctggacgtgcgtatgagtgatgctttttcacgtccgcaattatgcctgccgcaagaaagagtcatccgtcgagaggtcgcatcgaaatgaacattaattatcggtgtagaacttctattttaagtttgggatttcttttgcagcttatctcgtcggttgtggttgctcagttgccatccacgtcagatttgtccggtcagtggcgaatacgggatggcaatccgccagcttctgaagcctggcgtgacaccttggatgacagccagtggcaatatttgaaagtgcccgctaattggtatagtgagggcgtcgatcatcaaggcgtattatggtatcgcactcggtttacattaccggttttagataccgatgatatggcgactttggtattcgatggcgtcgactatcaaacggacatttggctcaacaatcaacaagcagggcgacatcagggttattttcaacgatttagcgtcgatataaccgatatggctcgaatagataatgtgctggctgtgcgtgtagatagcccttacgaaactccggggaaaatttggtcatttcataagcaactaattaagggcgtgttcaatcatcatgacacccgacccggtggagcgtggtcggatcgcggacaagatgccaattcgggcgggatttgggctccggtggcgtcacatatcagtcgtggtgccgttatagataatgtactggccgtgcctgactggtcacgggggcttgaacatccgattctaaaagtgagtttggattatcgtgccaaccgcaaccgttctgttgttatgttgctacgtttgatacctgataatttcatcggccaatcttatcaactggagaaaagtgtttcactggttgccagtcagcataatgcacaaactctcaccaccaattttcttattgataaccccgcattgtggtgggtgtcaggtcatgggaaacaaaatctttatcggctagaggtcagtttctcggatcgttttggcatgatggatgaaaaacatgttcgcaccggcttacggcaaattgcgatagacccgcaagagcaaagttggtcaatcaatggcaagcgcctattcattagagggacgaactatattggtagcccgtggttgggaagcttgacctcagccgattatcaccgtgatttagttatgatgcagcaggccaatatcaatgccataagggtacatgctcatgtggctgggcgggcgttgtacgatctggctgatgagatggggatactactctggcaagactttccgctgcaatggggatacgataattcagcctcttttgccagagaggcagccagacaggccgcagatatgacacggcaatttggcagtcacccagcgattgtattgtggtctgggcacaatgaacctccctgggatgctacctggatgcaatatcgttattcagactggcggccagacaccaaccgggcgttaaccgcgagcgttgcacaggtgctcagtcaggatcatagccgaatcactcatgcttactcatcaaccgcagaacactattggcaagggtggtactcagggcagaaaaatgatcatcttaagccggcaactacctcaataatcagcgagtttggcgcgcaagccttacctgatttggcaacgttaaaaacgataattccgcgcgctgatctgtggccaaaaacgacggataaacaagatgaaggttggcgcacctgggcataccataattttcaacctcatgagacatttgaattagctaaagtgattcgtgggccaaatatcaatacgtttatcaataacagccaacagtatcagtcaagtttgatccaactcgccgcagagagttatcgacgccaacgttatcaaccggtcgctgcattatttcactttatgttcactgaaaactggccgtcaattaattggggcgttgtggactatctccgtcatcctaaaccgggttattttgctttgcagcgagcttatcaacccgttttaccttctatagaacctaaaacagaaaattggggtcagggacagacagggcgtattgatttatgggccatcaacgataactggctcaactatcaaaaagcatcattacattggaaaatattgcaaagtggcatggttttatctgagggatcgcagaaaataaaattaatggcggatagcggtcaaaaagtgattgaattgcaagttatccctcgtgggattcagccaatgaatgtaatgagtgacattattaacgaacggggtgagatattaggccacaatgaactcgaaattcacattcaaccttaactaatactgctcattattagcagagaatacttaagttcgtctagattgtggccgacactatcttaaatagtagagtgatcctatgctttagccaatagtgattataagagtatagatattatatgaatctttctccattcagtgcccatacccagcaatcaccctcatcttggctttcatttaagttacaacaaaatattttgctgccgctgtttattttcattgttgggctggttatttcaggtgtgggagcatggtggctttataacgaaattgaagccaatgcaaaaatagattttcaacgtaatgttgacagagtttctggggaggttgagcggcgtttcaatctacctatttatggtatgaatggtgcaaaaggaacctatgcggcggacggtgatctaacccataaacaatttcatgcctatgttgcctcacgtaatttaccggtggagtttcctggtgtgaggggatttggttttattcagcgggtgcaacgcaaccagttaaattcctttattgcggatgtccgagctgacggtgcaccaaactacgctctacgtcagttgcaagataaacaacatgatgatttgtatattattagatatatagagccatcagaaggaaaccaaggtgcggaaggattagatgttggctctgagccggtacgacgagctgcggtactctcggcaatagacagtggtaaaccgaccctttcaggggctattcatcttgtccagtctaactttaaagctcccggggtactgctttttgttcctgtatatatttatggctcaaatcctaccactccagctgaaaggcgggcgtcattagtgggtgttctctattcccccatcgcaattgcagaactattaagtgatattcctgagtctatgaatgggcgagtggatgttgaactatttgatagtcttaacgatttgtctaataaaaatttgatctttgacgcggacagtagcaaatccgctgatttttcccctaccgaactgcaaagcgataaagtcctatccgcgagaatattccatagcaccaatgtattacggttgccgggtcgtgatatgacactgcgaatcagtagtacacctacgttcgaagcgcagatagagcgttatgtcccctggctgttatttgcttttggacttttgctcagttcagcattcgctttacttattcgccagcaagtcagtgggcgtaatcgggcagaaatgctggctcggaatatgactgcagatcttgaacgcttggctttagttgccaaaaatacttctaacgccgttgttattaccgatgtaaaacgtaatatcgtttgggttaacgaggggtttgaacgtattaccggatacagccaagccgaagccttcggcaagtcgccggggagattactgcaatgcaaaaatacagatcggggtgtagccagtcagatgagggtggcgttagatgccggagagccatttaagggtgaaatcgtcaactgtactaaatcagggcaagaatattgggttgagctggagatccaaccgcgttataacgataagaatgagccaatcggctttatggctattgagtcggatattagtgaacgtaaagcgacttatcaacgtcttgaagtggccttgcgtgaaaatgatgctttactcagcacccttaatttacacggcattacttctaccgcagatcgagatggaataatcacggatgttaatgacgcattttgtactattagtggttacagccgcgaagaacttatggggcagacttaccgcttagttgattctcatacgcactcgactgatttttggcaatcgatgtggaatgatattgctaatggaatctcgtggcgtggcgaaatttgtaataaagctaaagatggttctttatattgggtcgatactacgattgctccgtttaataatagttctggccaggttgagcgttatatttccattcaagttgatattaccgccaataaaaatcaacaagccaatcttattattgctaaaaatcaattagtcagagcggcagatgtcgctgagttaggtatttggacctggaacattccagaagacacgctttctttcgatgatcggatgaatgatatctatggtgtccctgaggaattacataatgctcctatcccgttggcatattggtatagcctcttgcatcaagaggatgttcccaatgttaaaagcgcgataaaagctgcattagaaaataaaagtgtctatcgtcaggttttccgtattgtggtgaaaaatcaagtccattttattcaatcaactggaacggttgaacaggatgaaaatggaaaagccttattgatgatgggaattaatcgggatattactcaacaacgtgaggccgaaaatatcctgaaaacagcaagagaagcggctgaaaaagctaataaggccaagtctgcatttttggctaatatgagtcatgaactacggaccccgatgaatgccatcctcggcatgctgacattactgcgtagaacgggacttgataggaaacaagctgattatgccgttaaaagtgaagccgccacgcgtactttactgcgattgctgaacgatattttggacttctccaaaatcgaatccggtaaaatggaactggaatgcattccttttgacattcatatcatgctgcgtgatttggcggttatcttatcgagctatctgaaggttaaaaaggttgaggtcttatttgatattgacccttcactacctcagtttgttgagggagatagtatgcgacttcaacagatattaaccaatctggggggcaatgcgctgaagtttaccgaacttggtgaggtggtgcttttcatcaaggttatagcgcaggatagccatcaagtgacgttgcattttggggtgcgcgataccggaattggcattgcgccagagaatcaggaaagtatttttagtggttttacgcaagctgaagcctcgacaacgcgccggtttggtggcacgggcttagggttagtgataagccagcgctttgttgcactgatgggggggacgctcaccttagaaagccaactgggtcaggggagtctatttcatttcactatcacgctgccgctgccttcttataccaatctggttataaataatgaaacaccagatacgttggcaagcagagcggaggcattgaatcatttacgggtcttggtcgttgatgataatccgacggcctgtaacctgatcaagcagatgggggaatcgctaaagtggagcgttgatgttgcaaccagcggtagtgatgcactgcaactgatgagacagcagcatgaaaggggtatgacttacggggcgctctttattgactggcaaatgccggggttagatggctggcagaccagtaaatgtgtgcgtgaaatgatgccagtagataacggccctattattgtcatgataaccgcccatgatcgcgaaatgttattacagcgtagcgaagaagatcaggcattactagatggttatctggttaagccgatcacggcatctatgttgttggattcagtgaacgatgcattaagtgaacgcaaacaacctgatgttgtgaaaccggcaatagccgaatctttacaccgactgtctggtataagactgttaattgttgaagataacttgaataaccaacaaatagcccgcgagttacttgaggatgagggggctgtggtcagtattgctaaccatggtaaagaggcgattgagatattagaacatcatccgtcttcatttgatctggtcttgatggatttacaaatgccggttatggatggctttaatgcgacaaagtatattcgaaaaagtattgggttaaaaaacttaccgattatagccatgacagccaatgcgatggtatctgatcgtgatgcctgccttgctgcgggcatgaatgagcatattggtaaaccctttgacttgaataatctaatacacatcgtcctaaaatacagtgggcaagctgatgttgccgccacggttagttatatgacccctcgcttgttatctgctgaattaaaaaatgttgcggcaacggcaggaattgatgttgatgttgcccttaatcgattaggaggcaatattacgctataccaaaaaatgctgtcgctgctcagtgaggatttggctaatttccccactcagttggagacattgttgactgcaggcgaccatatgtctgcatctcgtctgttacacactgtcaagggacttgccgcgcaactgggggccactgaactctctttgagcgcagggcagggagaaaagttatttagccagaatgcaatacctacagcagacacgattaatcaattactgagcgagatgagaaataaagtatccgctatacaatctgggatagtgacattaatccaaatgctatcgcaggataatgtgaggaatgtcccggcagaggtatttgatatacaacctattgagtcggaattgaatcgtttgatcttgttattacaaaactctgatatggctgcgttagaggtgatgaataaattgatgacgacttttgctgaacaacttaatggacaattatctatccttaatgatgcagtcaatcaattagactttgccaaagctatccagctatgccaaaccctaatggttaaccttcctactcggagaaataagaagacatgactataatccattctttttctcaagatttggccttaaatttaccaggggttgggaaacccaagatccttattgttgacgatcatccgataaatattcagatgctctatcaagcattttgttcggattatcatgtgtgtatggcaaccagcggtaaacaggcgctcgacgtctgtctcagtcaacatccagacttgattctgctggatgtcgaaatgcccggaatgaatggttttgaggtctgcaccagacttaaggcatcgccagacacgcaggatattcctgttatctttgtcactgcgcatattgatgaagagaccgaaacccgctgctttagtgaaggtgccgtagattttatcagtaaaccgattaacagaaacaccgttcgggcgagagtgaaaacacacttattgcttaaagctcaatctgacttattacgccaactcgtctatttagatggattaaccgaagtacataaccggcgttactttgataaacagttagaagtggagtggaaactatcaaatcgtaaccagactccacttggcatgattatgattgatgttgattttttcaaaaaatataatgacttatatgggcatcaggccggggacgattgtttgcggagggttgcaaaggttatccgagatacactcagacgccctgctgatctggtggcccgttatggcggcgaagaattcatctgtttgctccccgacaccgagttagttggagcaatggatgttgcggaaactatcagactgcatattcttgagcaaaaaatcccacattctggctccactgtttacccgtttgtcagtgttagtttgggggtctgttgtaaagaaacccatagtgtagattcaccctcgagtcttttgctcaaggctgataaacaactgtatctggcaaagaatagcggtagaaataaggtgagtggtcagtgtgttatctgagtgaggtataaggggctttttatcaacaaagataggattcgcgctcttcagtttagcgtggagcggttttagtgcgcatggcagatgaaacgagacatgcaccgctatcaattatgctgcggtatttattgaagattcaggcttgacgctttcaatatggatactgggaatataagtaaaagatctgcctaatgtcaccgtccaataaaccctaccaaactaaagccaatcagtgatcgaatcctgcaatctgttacagccttaagaattacaggtataatcctagaaattattcaactggtttagaaacgaagatgacaaaactcaccttacaagagcagatgctcaaagctggattagtaaccagcaaaaaaatggccaaagtccaaaaaatggctaaaaaatctcgggtgcaggctcgtgaggcaagagaggctgtggaagaaaataaaaaggcacagcttgagcgcgataaacaactaagcgaacaacagaaacaagcggctttatctaaagaacataaagctcaagtgaaacagcttattgaaatgaatagaatcaatatctcaaaaggtaatattgattttaacttcacagataataatttaattaaaaaaatagctgtggataagcttactcaatctcagttgatcagtggtcgcctggctattgctcgtttggctgctgataacagtgatgagagagagtatgcaattattcctgcgagcgtagccgataaaattgcgcagcgagatgcgagcagtattgtattaaatagcgcgcttagtcaggaagaacaagacgaagaagatccctatgctgattttaaagtcccagacgatttgatgtggtaattaacgctttgccgatcccgatatatgaaaagtcctaacgggcttttcattaagttttcatgtccaatccgttcagcgaaaaacgccaatgccgcgtatgattttcactgttcgcgatagatatcaggtttacagtcaacactatctgattaatcactctcatttccactttaatgccatactccgtgccttcgcggcagcatcatgagagatattttcgctatcagaacgggctagtatgacgggctttgatcaactcttggctgatgggatgaacaaaatgcaactcacttgcgtgcagcatcagccgcgctgtctgttcggtgccgggtaaccgaaggccgccatacaggtcacagcccaaaatggggtggcccaactgctgacagtgaatgcggagctgatgagttcgcccggtttccggtattagccgtactcgcgtcaatggcagtaacctcccatcttccagctcgcgataaaagcgctcaacgacccgataatgggaacgagcaggtttgccgcggattgaacaaatcgacatcaacggaaacagcgccgcatctttggcaatcgccgcgtctatcaccccttcatcgttgtccagatgcccgcaaagcagcgcgctataaactttggtcactgtacgtcggctaaactgctggcagagcgcggcattgatagccttattgcgggcaataaccatcagcccggaagtaccgaaatcaaggcgatgaaccagtgtacagccagggaatatttgtaccagccgatggtgtaccgagtcgagattttgcgggtttttccccgagagactgagcagtccggagggtttattgataagcacgaggtgatcgtcctgatagagattttcgatcttgtcatggcacggcggggcaataaaggtatcgataatcttagacatcaggtgactcggatagattgtgtgagcggatgataacacgctagttttaacggatcgttgctatcagcgatagtctttgataattgcatcgacatcgatgctcagtatggcgctaaaaacgttatcccatattgatcggattggatgaaaaggcgcctgtcacaaataaaatatctgagcatccggtcagcgtaggcggtattgctcggtatagcatcgctgttttgtccgtgccctcaaattggctggccgaggttaaagctatgttctcgaggacctgccatcttgcggataaggtaagctttttttcagcgtttgattcctcgatacccctcaaactggggagtctgctgttatgataaaaaagtcgtaatattgactaatcttattgcgagtgatggtcggatttgtatgatggagaatatcgggccaggcaagtaagtgagttggcaaccaaactttggttgccattttctgttcagtaagggacacccgtgcggtcatcgtataatggctattacctcagccttccaagctgatgatgcgggttcgattcccgctgaccgctccaaattttagatacaactgaggaaacgatgaaaaaatcactggctacgttggttttatcattgggttttgttgccgcatatgctggcgcgtcaacaactaaaaatcggctgcaatcgccgacgccaggtgttgtatgcgacacatacgtttgtgccgatggcaaaaatggcatatcagtgccgctgacagagcggtatttaggtaagaagaaaagtcagcgtttagcctctcagggggatttcgatcgcacgcaatttacctttgtaaatggcatattctgtgacgtgaaagaaagattatgccgtaaagatcgttattacggtattgacggaaaacacagtggcgccattgacacacagacaactgaatggttgttcggccagaaaaaatagcgcgaatttcgtattcctcgtggtgcttaacactccaaatcgcaaggctcacttcggcggcggtatttttaaacgatgccgatgaaggccgcgagcattcccatggggctttgcccgtagaaggttcatgttgaatctcaattcgtccaaccgccatcggaataaatggcggttggcgagggggagttaaaacgagattacttcactttggttatttgtttgacatctaactcaacggagttccagtctttatctattttcccttgcaattctacggtatctttcggggtcaccgtcaggccataccaacgcttatgatcgatatctacggtcatggtgccagttgcatcgcggaacaggtaatgatcgctgccaatacgctgctcgatgttcccgcgcagtgtcatccaagagtcatcccgcatggttttattgcttatctggttggtaacgcgtgagctcgcttcgctgcgccgattagcaacccgcctgagccagcgccagcctgacgatgaaacgccgctgccgttgactgcgattccaagtgaagtcaaaccgctggtgacggcgctaaacagcctatttgcccgaacgggtaatatgctggtgcgcgaacgtcgtttcacatcggatgctgcccatgagctgcgtagtccgttggccgcacttaaggtacaaactgaggtcgttcagctggcacaagatgataccgagatacgaaatcgcgctttagccaatctgacaaaaggcatcgatcgcgccacacgcctagtggatcagttacttacactatcgaggctggattcattatcggggttagatgatgtgcaagacattgccatgcaggatatcttgcaaactgccgtgatggatcattatcacactgctcaggcaaatggcgtggaactcatactggatattcgtcagccaccgtcacagcgtcgcggtcagcccttattattggcattattgatacgtaatttgctagataatgctattcgctatagtccgcgtggcaccacggtcaagatcacgttagatgcacagggatttagcgtcgaagacaatggctcaggcgttagccccgaatttttacaacgcatcggggaacgctttttccgaccgccggggcaagagacatccggcagtggattaggcttatccatcgtacagcgcattgcggtattgcatggaatgaccacgagttttagcgctgggaagaacggtggatttcggggcgaggtgagctggtggtagatttttgctatttcgttatttcaactatcataattggtgcagctggatacatataacactaacaaatattctgggtcaatgtagaagggagcagattgttagataactttacgtatatctttcttctattaatagattactgccaatagcattgaaatcaatcagaatgtgtatcggcgcgcgatgatattttatgtttggtaaataaatataagggattagttaaatatttatatcacttatatttaactaatcccttagatggaaataattatagaaatcactctgtttaatatttgtttataaaatatgctttttgaatctgatatgtttattcggcaaatttgataaggaggttattatgtctggatttgtggatttcaaactggttcattcaggagcgccagttacaattagtaaaacggctattctatatgtcgaggaaaacactcgcgaggctaatgtcaccaacttacattgtgttggtagtatcacccatgttgttagcgcaacatacgctgaagttcgcaagaaactacccaaatttatcgaaacaaaacgcagtgacaatggaacgccaaaagtggcattacacgactggaatgtttcatatatagagaaaagcagcagcggtactgcaatagtctattttacagagcaaggacttagtgttcctgtagcagagccgtatgagaatattattaaaattttccatgcgatataatattaaataacctgagcaaggtggggtaaagcccccactaaccctgaacttatcttggttaataacggttaaatcatgcatacattgatgatttactttcattagtgtatgcatggctaccaatgatacctcataggtagcctggctcttaaactgtgagttattactcgttaaactaagggcagcgaaggcgtttatgatgtactgatgtttttattcaaggtacttcgcttaaataagcgctggaggagggaggaaatcgttctaagaagtttgtaggtagtgctattgtgactagtatagtgaactaagattttctttttattattaattctgtaaaacttacctcgtgaagattgtaactctaaatcgtcgcttattatagcggttttcttttttaatcggctaaatagctggtggatgttattgttactaatggttgtctctttttctggccagattgaggaaagtaagacgtctcgatctattttttcaccgtttattgcgttttttatcaaaaccataaataaacaaaattctttatttgtcaattccacactacctttccagctgtaaaccactttgtcgtcaattgccacaaaatatatcatcgtcgctccataatgaaaaaagtcacatgcaaatatatcgcagtcagaatggttttgtaagatcactttcaatttcaaactaattatattgattagcctcatatttttattaaaaaataaccaaaccgcttaacattataatttctatttatgatgtttttttacttatacggttaatggtattggcttacattcattaaatcaggtcattatgaactgtagcccaatggaggaaggctaaggtaagtgattatattgtttaagtttcaataaatacaaagccaactggattttcatgatgtaagttacctgaggtattcttacgttcaactcacattcaattttaaccgtggaataataagtcacttttctattatatgcttataaataacttacagattaattttaatggttaacttgttgactatattagttacattaaataaaaattcactattaagtatcagtagtgagcagtttgattttaaaataacatccattgattaatccatgtctgtacaactgagttgcgccggcaaataagatgacgataagaagtaaacagatagatttagttggcgtaataatactatttgttgtgtcaattttcttggttcctgactaaaacattaaggtttctcagttaagctatatacgataaatattggcatctttctattgcaggatgatttctagtgctaagcattatagccaggagtaaaggaaataacgctttaacgataccaccattaatttaaaaaatggagtctgaaatggaaaaagaagaaaaaagcaatctcatctacgataaagatcctggatatgtgtgggacaataaaaatgaatgcgaaggagcagcagaagagacctatcaagaactcaattatgaaccctctatatcggcagataaactcacctggaccccaacccgattggcgaaaaccgtatttaatacttatgaggatgatgacgattttaacgtactttgttatttcaccgattggtcacaatatgaccccagaataatcaacaaggagattcgtgatactggtgggagaagcgcagatatattacgacttaacacaccggatggtcgaccctttaagcggctgatctatagctttggtggattaatcggtgacaaaaaatactcagctgatggaaatgccagtattgcagttaggctgggcgtagcaactgatcccgatgatgcgatcgccaaccataaaggaaagacgattcccgtcgatcccgatggtgcagtgcttgcaagcataaactgtggatttacaaaatgggaggcaggggacgccaacgaacgttataaccaggagaaggccaaaggactattgggtggtttcagattgcttcatgaagcggataaagaactggaattttccctcagtattggcggttggtcaatgagcggcttatttagcgaaattgccaaggatgagatattacgtaccaatttcgttgaaggtatcaaggatttctttcaacgatttccgatgttcagtcatctggatattgactgggagtatccaggttctattggggccggtaacccaaatagtcccgatgatggtgctaattttgctattttgattcaacagattactgacgcaaaaatctcgaatttaaaggggattagcattgcgtcttctgcggatccggcaaaaattgatgcagcaaatattccggcgctaatggacgcgggtgtgaccggtattaacctgatgacctatgatttcttcactttaggtgatggtaaattatctcatcatactaatatttatcgggatcctagtgacgtctattcgaagtattcaattgatgatgcagtgactcatttaattgatgagaaaaaggttgatcctaaagccatttttattggctatgcgggctacacgcgaaatgcaaaaaatgccacgataacaacaagtataccgtcagaagaagccttaaagggcacctatactgatgctaaccaaacgctaggcagctttgagtattctgtcctcgagtggacagatattatttgccactatatggactttgaaaaaggggaaggacgcaacggctataagcttgtacacgataaagtagcgaaagcggattatctctacagtgaagcaactaaggtgtttatttctctggatacgccacgctcggttagagataaaggaagatatgtaaaagataaaggtctgggcggattatttatatggtcaggcgatcaggataacggaatattgaccaatgccgcgcatgaagggttgaagcgacgaatcaaaaataaggtgattgacatgacgccattttatcttgattccgatgaagaattacctacctacacagaaccggctgagccacagtgcgaagcatgtaatatcaaataaatagcctcagataattaatactattaacgaatcatgaaatgattcgtaatggcctgttacattcaaaacaagatggaataatgaaatggataaatataataattattctaatgtaataaaaaacaaatcgagtatttctcctttgctcgctgctgcagcaaaaattgaaccagaaataacagtactatcaagtgcatctaaaagtaaccgttctcaatatagccagtctttggcagacactttattagggttaggttatcgctctatttttgatattgctaaggtttccagacagcgctttattaaacggcatgatgagtctttattgggaaatggggccgttatttttgataaggccgttagcatggctaatcaggtcttacaaaaatatcgcaagaatcggcttgaaaagagtaatagcccattagtgccgcaaacgtcttcatcgactgatgcatctagcgaatcgcagacgaacaagctacctgaatacaatcaactattccctgaaccttgggataacttctgtcgcccgggcgctattgaagcattggatagcccagcaagttatttattggatctgtataagtttattcaaagcgtagagttggatggttcaaatcaggcaagaaagttagaaacgcgtcgtgccgatattcctaagttatctttggacaatgatgcactgtataaagaagttactgcgttatcaattgtcaatgatgtactgtcaggcagcgccagggaatatattgaccagtcaggtcaggcagataaagcggttaatcaaatcctaggggatacgcattttccctttacactaccttatagcttgcccacccaacagataaataaaggactcggcgctagtaatattgaactaggaacggtaattcaacgtgttgaccctcagttctcctggaatacgactcaagaaaaatataatcaggttttattggcatatacccaattaagcagtgaacaaattgctttgctgagtttgcctgatgtgtttacccaaaattttttaacccagactgaactctccgccggctatttaagcgccagtaccacggaaatcttggcggaaaaagatctttctcgccacggctatattgtaaaagctgcggacaatataaaggggcctactcagttagttgagcatagtgacgcctcttatgacgtaattgagttgacatgtaccaatcaggctaaagaaactattaccgttaaattacgcggtgagaatattattacttatcagcgtaccaaagcgcgtatggtgccttttgataattcttccccttttagtcgacaattgaaactgacttttgttgctgaagataatccttccctaggcaacctagacaaaggcccatatttcgccaatatggatatttatgccgccgaatgggtgagggaaaatgtcagtagcgaaacaatggtaagccgacctttcctaaccatgacttaccgtatcgctattgctaaagcaggggcttcgttggaggaattgcagcctgaagctgacgcgttcttcatcaataattttggcttgagcgcagaagacagcagccagttagtcaaactcgttgcttttggcgatcaaaccggttccaaagctgaagagattgaaagtttattgagctgtggagaaaacttacctattgtttcacctaatgtcatctttgctaatcctatttttggcagttatttcaacgatgagcctttcccggctccttaccacttcggtggcgtttatattaatgcccatcaacgaaatgcaatgacgattataagggcggagggcggaagagaaattcagtcactctctaacttccgactggagcggttaaatcgtttcattcgcttacagcgctggctggatttgccctcccatcaacttgacctgctattaacatcggtaatgcaggcagatgctgataattcgcaacaggaaattactgagcctgtgctaaagtctctcggtttattcaggcacttaaatttacagtataaaatcacgccggaaatattttcgtcttggttatatcaattaacgccttttgccgttagcggtgaaatcgcattctttgatcgcatatttaatcgtgaacagctatttgatcaaccctttattttagatggtggtagctttacctatctggatgctaaaggctcagatgctaaatcggtgaaacaattatgtgctggtttgaatatatctgcggtcactttccagtttattgctccgttggtacaaagtgcattagggttggaagctgggacgttggttcgcagttttgaggttgtgtctagcctttatcgcctggtcagtattccgcagacattcggtttatcgacggaagacggattaattttaatgaatatcctgaccgatgagatgggatatctggcgaaacaacctgcctttgacgataaacaaacgcaggataaagacttccttagtatcattttgaaaatggaagccttaagtgcttggctaacaaagaacaacttaacgccggccagcctggcattacttttaggtgttacccgattagcggtggtgccgaccaataatatggtgacgttctttaaaggtattgcgaacggtttatcagagaatgtgtgcctgacaacggatgatttccagcgccaagagttagaaggagctgattggtggacacttctatcaacgaatcaagtcattgatgatatgggactcgtgcttgatattcatccagtctggggtaagtcggatgaagaaatgctcatggaaaaaatacaaagtattggtgtaagcaacgacaacaatacgctgagtattatcgtgcaaattttgattcaagccaaaaacgctcaagagaatctgttatcgcaaaccatttctgctgagtatggagtagagcgcagtgtggtgccgcttcaattacgttggttaggtagtaatgtttatagcgttttgaatcaggtattaaataatacgcctactgatatatctagtatagttccgaagttgagtgaattgacttatagcttattaatttatactcagttgataaattcgttaaaactcaataaagaatttatattcctgcgtctgacgcaaccaaactggcttggtttaacacagcccaaattatcaactcaattatccctacctgaaatatatctcattacctgttatcaggactgggtggttaatgcaaataaaaatgaagacagcattcatgaataccttgaatttgcaaatattaagaaaactgaagctgaaaaaactctcgttgataatagtgaaaaatgtgcagaactgttggcggaaatattagcctgggatgccggtgaaatattaaaagcggcctctctacttggattaaatccacctcaggcgacgaatgttttcgaaatcgattggattagacgactacagacattatccgagaaaacgatgatttcaaccgagtatttatggcaaatgggcgatttaacggagaattctgagttttctctgaaggaaggcgttggtgaagcagttatggccgcgttaaaggcacaaggagatagcgataatgtctaattctattgaagcgaaactacaggaagatctacgcgatgccttggtggattattatctgggacaaattgttcctaatagtaaagatttcaccaatctgaggagcaccattaagaacgttgatgatttatatgatcatttgttactggatacgcaagtgtcggctaaggtcattacttcacgtttatctctggtgacgcagtcggtacagcaatatatcaatcgaattgcacttaatcttgagcctggtttgtctattaaccagcaggaagccactgactgggaagagtttgccaaccgttatgggtattgggccgctaaccagcaactaagaatgttcccggagatttatgttgatcctactttacgtctgactaagacagagttcttctttcaattagaaagtgccttgaaccaagggaaattaaccgatgatgtcgcgcaaaaagccgtattaggttatctgaataattttgaagaagtcagtaatctggaaattattgctggttatcaggacggcatcgatattgagaacgataaaacctatttcgttgcccgaacccgaatgcaaccctaccgttatttctggcgatctctggatgccagtcagcgtaatgctaattcccaagagttgtatccaacggcatggagtgaatggaaggcgatatccgtaccattggaaaacgttgctaacgggattgttcggccgattatgatggataaccgcctttatattagttggtttgaggtggcggaagaaaaggagacggatagcgacggcaatattattgtatcgggacgttatcgcactaaaattcgtctggctcacttaggatttgacggtgtttggagttcgggaacaacgttaagagaagaagtgctggctgaccagatggaagaaatgatcgcggtggtcgatcgcatggaagatgagcctcgtctagcactggttgcatttaaagaaatgagtgaaagttgggacgtcgtatttagctatatctgcgatagtatgctgattgaatccagtaatttaccgactaccactcatccgccaaaaccaggagacggtgataaaggattgtctgatctggatgattacggtgctaatctggtttggttctatttacatgagactgccaatggaggcaaagcggagtacaagcagttaattctctatccggttattattaaccgggattggccaattgaattggataaaactcatcagggagactttggcactgtcgatgatttcacgctgaattctaattatactggcgatgaattaagcctgtatttgcaatcttcgtccacctataaatatgacttttctaaaagtaaaaatattatttatggcatctggaaggaagatgcaaataataatcgctgctggcttaactataaacttttaacgccagaagattacgagccgcaaattaatgctacgttggtaatgtgtgacaaaggtgacgtcaatatcattactggattcagtttgcctaatggcggtgttgatgcaggcggaaaaataaaagttactcttcgggttggtaaaaaactccgggataaattccagattaaacaatttagccaaactcagtatttgcagttccctgaggcgtccagtgctgacgtttggtatatcggaaagcagattaggttaaatacgctgtttgctaaagaacttataggtaaggcaagccgaagtctggatttggttttaagttgggaaacgcagaatagtcgtttagaagaagctattttaggtggcgcggctgaacttatcgatttagatggcgcaaacggcatttatttctgggagctatttttccatatgccatttatggtgtcctggcgctttaatgtggaacagcggtatgaagatgcgaaccgttgggttaaatatttgtttaatccgtttgagtgtgaagatgaaccggcattattgctaggcaaaccgccgtattggaatagtcgtccgttagtggatgaaccatttaagggttatagcttaacgcaacctagcgatcccgatgccattgctgccagcgatcctattcattaccgtaaagcggtctttaatttcctgaccaagaatattattgatcaaggcgatatggaatatcgcaaattgcagccgtcggccagaacgctggcgcgtctgagttattcaacggccagttcattattagggcgtcgtcctgacgtgcagctgactagtttctggcaaccgctcactcttgaggatgcgtcctataaaacggacagtgaaattcgtgctattgaaatgcaaagtcagccattaacatttgagcctgtcgtgcatgaccaaaccatgagcgccgtggataatgatatctttatgtatccaatgaataacgaattgaggggtttgtgggatcggattgaaaaccgtatttacaatttgcgccataacctgacgttggatggaaaagaaatcaatatggatctttatgattcaagtatttctccacgtggtttgatgaagcaacgttatcagcgggtcgttaccgctagaaacgccagtaagatgaacttcaaagtccctaactatcgttttgagccgatgttaaaccggtcaaaatcgggtgttgagactcttattcaattcggcagtactttattgagcctgttagaacgcaaagatagtttgagttttgacgcttaccaaatgattcagagtggcgacctttatcgcttctcgattgatttgcagcagcaggatattgatattaataaagccagtctggaagcattacaggtaagcaaacagtctgctcaggatcgttatgatcactttaaagaactgtatgacgagaatatctcttcgacggaacaaaaagttattgagttacagtcacaggctgccaattcgttgttgatggctcagggaatgagaacggctgccgccgctttagatgtgattccgaatatctatggtttggccgttggtggctctcactggggcgcaccgctgaatgctgcggctgaaattattatgattaagtatcaggcggacagcagtaaatctgaaagcttgagtgtttctgaatcctatcgtcgtcgccgtcaggaatgggagttgcagtataaacaggctgaatgggaagttaattctgttgagcagcagatcaatttgcagaatatgcaaattaaagcagctaataaacgtctggaacaggttgaagctcaacaacagcaggcaatggctctactggattatttctccgaacgctttacaaacgaaagtttatatacctggctgatcagtcaactctccagtttatatttacaagcgtacgatgcggtgctttcactttgtttatctgcagaagcttctttgctatatgagctgaatttgggcgagcagagtttcgtcggtggtggcggttggaacgatctgtatcaaggattgatggccggtgaaacactgaaattggcgttaatgagaatggagcgggtttatgttgagcaaaactctcgtcgtcaggaaattaccaaaacgatctcgttgaaagcactgctcggtgaaagctggcctgcggagctgaataagctaaaacaaaaaacgccaattaactttaatctggaagaacagatttttgttgaggactatcaagagctgtatcagcgcagaattaagtcggtttcggtcagtttgccgatgttagttgggccttatgaagacgtgtgtgcgcagttgactcagacctccagtagttatagcacccgggcagacctcaagacggtagaaaatatgctgactaaaagaacgtttgccgatacgccgcacttggttcgtagtattcaacccaatcagcagatttctttatcgactggggtgaatgatagcgggctgtttatgcttaattttgatgatgagcgtttcttgccatttgaaggttctggcgttgattcaagctggcgtttgcaattcaccaatttgaaacagaatttggatagcctcaacgatgtcattctacatgtgaagtatacagccgcgattggctcatcaactttcagtcagggcgtaaggaaaatattggccaatataaacaacgatgaacatcatcatcaccaccaccaccactaactgctgtttttgatcagctatttattttttcaatcatatttatctcacttggctcctttttaatcaaaggagccaacaaaaatagtggagttctgttatggtcaataaatatacttacacctcatctaaagcaatgtctgatattagtgatgttattggtgaacctttagctgcatgggatagtcaggtcggtgggcgggtatttaacgttatatttgatggtaaagtttataccaatacctattgggttgaacgctggcaggttcccggtattggtagttctgatggtaaccctcacaatgcctggaaatttgtacgggcggcaacggcagacgaaataaataaaatagggaatccaaccacagcagatgttaaaccgacggaaaatattccttcaccgatattggtcgaagataaatataccgaggaaacgtattctcgccctgacgtaaattttaaagaagatggctcgcaagggaacctttcttacactgcaacccgagtttgcgccccgatgtacaatcattatgttggtgataaaacaaaaccgaagctgtcggcttatattaccgactggtgccaatatgatgctcgtctagacggcggtggtagtaaagaagaagaacgcgggcgtggttttgatttagcgacgttgatgcaaaatcccgctacctatgatcgactgattttcagtttcctcggtatttgcggtgatatcggcaataaaagtaaaaaagtgcaggaagtctgggacggatggaatgctcaggcgccgagtttaggtttacctcagattggtaaagggcatattgttccgttggatccctatggtgatttaggcactgctcgtaacgtggggttgccgcctgaaagcgccgataccagtattgaatctggcacatttttaccttattaccagcaaaaccgtgctgctggcctattgggtggattgcgtgaactgcaaaagaaagctcatgcgatgggccataaactcgatctggccttcagtattggtggttggagtttatccagctatttctccgctttagcggagaacccggatgagcgccgcgtttttgttgccagcgtggttgatttctttgtgcgtttcccaatgttcagctgcgtggatatcgactgggaataccccggtggcggtggcgatgagggaaatatcagcagtgataaagatggcgaaaactatgtattgctgattaaagagctacgcagcgcattggatagccgttttggttacagtaacagaaaagagatctcaatcgcttgtagcggcgtcaaagcgaaattaaagaaatccaatattgatcagttggttgctaatggtctagataatatttatctgatgagctacgacttctttggcaccatctgggccgattatattggtcatcatacaaacctgtattcaccaaaagatcccggcgaacaagagttatttgatttatcggccgaagcagcgattgattatttgcataatgaacttggtattccgatggagaaaattcatttggggtacgctaactatgggcgctcagcggtagggggggatctgacaacccgtcagtataccaagaatggcccagcgttaggcacgatggaaaatggtgctccggaattcttcgatatcgttaaaaactatatggatgccgagcacagcttaagtatgggtaaaaatggttttgtgctgatgactgacacgaatgccgatgctgattttctgtttagcgaagctaaaggccactttatttcattagatacccctagaacggtaaaacaaaaaggtgaatatgccgcgaaaaataaattaggcggcgtattttcctggtctggcgatcaggattgcgggttattagccaatgcagccagagagggactgggttacgttgccgattctaatcaggaaacgattgatatggggccgctgtataatccaggcaaagagatttacttaaaatcaatttctgaaattaagagcaagtaagcgtttacagcgccaattgttatttaatcgcgattgatttctattaattatctagcctattaatttaaattaattgaaaaatcagatagcggaacgtggcgggttgttttattgcttatttaaaatggcgttatttataacctgtcacggtctggcaatgttcggctattgattaatagctgacaggagtctttatgcaaaattcacaggaaatggctatcacgaccctttcattgccgaagggcggaggggcaattaatgggatgggcgaatcagtgggtcaagcagggcctgatggaatggtgaccttttccataccattacccttctccgcaggtcgtggcgtagccccggcgctttcgttgagttatagcagcggtgcagggaatggcccttttggtatgggatggcaatgtagtgcgatgagtattagccgtcgtactcaaaaaggggttccccaatataacgaagatgacgagtttcttagcccttccggggaagtgatggctatcgctttaaatgatagtggttttgaagatgtgagaacggctaaccgtctacaaggtatcccattacctttcagctataaggtcactcgttaccagccgcgccttattcaagacttcatcaaaatagaatattggcaacccgttaaacaaactgatggcacgccattctggataatttattctcccgatggacaaacgcatattctggggaaaaattcccatagtcgggtggctaatgctgaaaacccatcgcagattgctagctggctgttggaagaaacggttacgcctaccggcgagcatatttactatcaatatagcggcgagaatcaagtcaattgtactgatgcggaaatagcgcttcatccacaggatagtgcccagcgttatttagcgcggattgactacggtaatatttcccctcaagccagtttatttgttttagatgaagaactacctaatctcacccagtggttattccatttagtgtttgattacggcgagcgagatatctctattaataaaattcctactttcgagggaggaaccaccggttggttagcccggccagatatgtttagccgctacgactttggaattgaaattcgaaatcgccgcttatgccaccaagtattggggttccatcggctggaggccttgaatgatcgagatgtgactgacgaaattcccgttttggtgaatcgactcacgctagattacgacctgaataacagcgtcagcaccttggtagctgtccgtcaggtggcgtatgaaacggacggcagcccaatcactcagccgccgttagaattcgactatcagcgttttgatacagggagtattcccggctggcaggaaatgccgcagcttgaggcttttaacggctatcaaccataccaaatgattgatctgtatggtgaaggtacaccaggcattctgtatcaggaaacgccgggtgcctggtggtacaaatcgccgcaacgccaaattgggggcgattctaatgccgtgacctatggggcaatgaaagcgttgcccaaaatccctcgcttgcaagagggagcgacgctgatggatatcaacggtgacggtcgtttggattgggtgatcacttcagcgggagtacgaggttttcatagtattcattcgacaggtgaatggacacattttacaccattgaacaccttacccaccgagtattttcacccgaaggcacaattagcagatctggttggcgcgggattatctgatttggtgcttatcgggcctaaaagcgtgcggttgtatgccaatcagcaggggaactgggctccggcgcaggatgtcacgcaggcagaaaacgtcagcttaccggtcattggaatcgattcccgtcaattagtcgcttttgccgatatgttaggttcgggtcagcagcatctggtcgagatcacggcagatagcgtgaaatgctggccaaatatgggacacggccgttttggccaacctttgactttggaaggatttagtcagccgcagaccagtttcaaccccgatcgggtgtttctggctgatattgatggttctggcactaacgacattatttatgctcattcggaatgtctagagatctacctaaacgaaagcggtaatcgctttagtaaaccaatctctttattactgccggacggtgtgaattttgataacacctgccaactgcaagcagctgatattcaaggattaggcatcgccagtttggtgatgacggtgccgcatatgtcaccgactcattggcgctgcgatctggcgttgaataagccttggttattgaatgtgatgaataataatcggggggcggaaacctgcttgttttaccgcagttcggctcaattctggctggatgaaaaacagttggttgaggcggcggggcagcaacctgaatgtcatttgccatttcctatgcatttacactggcgtagcgagatttttgatgagattacaggtaaccgtctcactcaagaacaagaatatgcccacggttcctgggatggccaagagcgggaatttcgtggctttggccggttgattcagcgcgatacggatggttttgcccagggaacggtcgacattcctactcatccttcccgaactgttagctggtttgctacgggaatccctgagattgacaccacgctatccgcagagttttggcgcggagatgatcaggcattcagccctttctcacctcggtttactcgttgggaaaacgattcagaggctggttccgatgttgcttttataccttcagagcatgatgccttttggctgaatcgcgcgatgaaagggcaacttttgcgcagcgaactgtatggtgatgatggcactcccgaagccgagattccttattcggtcacagaaatgcgtcatcaggtgcgggcgttgcccacaaccgacgccacagtaccttcggcatggtgttccaccattgaaacccgaagttatcaataccaacgggtggccgctgatcctcaatgtagccaacaagtagtcataaaagcggatcgctatggttcgccattattaagtgtggcaatcaattacccgcgacgtaaaaaaccggaaaagtcgccctatcctgatgatttaccggaaacgctgtttgatagcagctacgacacgcagcagcagcaactgcatctgaccaaacaacagcaaaattattttcatttgaccaatgacgataactggctgttagggctgccaaaagagcaacgaaacgatggctatcagtacgatcaggaacgcgctccggctaacggatttacgctagaaacgctcatcgcgtccaatagcctgatcggttcgaatcagccgtttacctatttgggccaaagtcgggtggcttatcagggcggtgtggatgaacaaccgtctttgcaggcgctggtggcctacggcgaaaccgctattctggacgagaaaaccctacaggcctttgtcggcgtgctggacagcaaaacacgcgatgaattgctgttttccgccggttatcagttggctccgcgcttgtttagggttgagtcagagccggatgtttgggttgcccgtcagggttacagcgaattcggtgactattcgcaattttggcgtcctctcagccagcgtagtacgttgttaacagggaaaactacgttgaagtgggataagcattattgcgtagtgatagaaacccaggatgcggctcaactggtgacacaggcgcgctacgattaccgattccttaccccatatagcctgacggatgccaatgataaccagcactacgtggttttgaatccgtttggggaggtgattgccagccggttttggggaacggaagcgggtaaagacgcgggatacagcactcctcaagccaaaccttttgtggtacctgccacgattgaggcagcactggcgttaagccccggaattccggtggctcactgcgccatttttgaacctgaaagctggatgcaaaaactgacgcagcacgatgtttccgaacgaatggcggataacggtactctttggaacgcattgctgcaggcgcgttttgtcaccgaagatggttatgtctgcgcgctgggtcggcggcgctggatggcgcgccatggtttatcggtgctgatgttgacgctactggccgagattccgcgtacgccgcctcattcccttactattactaccgatcgctacgatagcgatgaccaacaacaattacggcaacgtattctattcagtgatggttttggccgcctgctacaaagcgctcagcgtgttgaagccggtgagagctggcaacgcagcgaagactcctcgctggtggtcaatgtttccggcacaccagccttagtggtgacggataatcgttgggcggtttccggacgtacggaatacgacgggaaagggcaaggaatacgcgtttatcagccttattttctggatgattggcgttatctcagcgatgacagtgcacgcactgacctgtttgccgacacgcatatttacgatcctttagggcgcgaatatcaggtcattaccgcgaaaggttaccggcgtgaacgccagtataccccgtggtttgtggtgaatcaggatgagaacgatacggcagcaaatctggcgatttagttcccataagaaaattcgccctacattgtcgtggggcggatgaaaacgaggaaatatggtgttgaaagccattccctatcaaaaggataaccgagatgaaccagtttgattctgcgctccatcagggcacgccgggggttagcgtgctggataatcgtggccacgttatacgggagttacggtattatcgccatccagatacaccgcaggaaattgctgagcgtatagcttttcatcaatatgatagttatgggtttatttctcaaagtatcgatccgcgtctggcggaaagacgaaagcaggatagttcggttaagccgaatttgtcttactttacggcccttagcggcgaagttttgcgtactgacggcgttgatgcaggcacaatcttttccctgaatgatattgccgctcgtcctgccattagcatttccgccaccggcgtgtcacatacctggcaatatgaaggtgaaaatcggccggggcgggtactcagtcgcagtgaaagggagaaagatcgagaagagcgaattattgagcgcttttactgggctggcagtgatgcatcgcaaaaagcgaacaatctggcggggcaatgcttacgccattataacagcgccgggctgaatcaaacgctgagtattgcgctcactggcacgccgatatcggcgtgctttcagccactgctggagagcgcagagccggaatggcaggggacgaatgaatcggcgtggctggaattattgacgccggaaattttcaccacttacaaccgcgccgacgccaatggggaaaccttggtacaaacggacgccatggggaatatccaacggttggcctacgatgtagccggttttcttaaaagcagctggctgagtttaaagggcgggcaagagcagatcatagtcaaatcgttgacctattcggccgccggacaaaagctgcaagaagagcacggtaacggtgtgctcaccacttatagctatgaggcggaaactcagcgtttaatcggtatcagaaccgagcgtccagcggggcatttatcgggagccagagtgtttcaggatctgcgttatacctacgatcccgtaggtaacgtgctgcgtattaccaatgacgcggaagcgactcgtttctggcgtaatcagaaagtggtgccagaaaatacctacatctacgacactttgtaccaattagtcagcgccaacgggcgcgaaatggcaaacattccgcaacagagtagccaacttcccacactgtctccgattgataacaatgcatataccaattacatccgcaattatcactatgattctgctggtaatttgatgcaaattcgccatacatcggccgcagccaataatagttacaccaccaatataactgtttcaaaatacagcaatcgtgcggtattaagctcactaaccgacgatgtcgataaagtggaggcgttctttgacgccgcgggacggcagaaccaactattgcctggtcaaacgttaagctggaatgctcgcggtgaactggcgaaggtcacgccggttgcgcgcgatgggcaggaatctgacagtgaaacataccgttatgatgctaatagtcagcgcgttagcaaaatggctattcagcagtccaataacaatacccaaactcggcgagtgctctatctggcaggtctggaacgaagaacaattcatcaaggtaatacgttgtttgaaacgttactggtggtgaaaattggcgaagctggccgggcgcaggtacaggcaatgcactgggagcttgggcaacctactgaagtggctaacgacgaactgcgttacagttacgataatctgattggcagcagtgggttagaggtggatggaaccgggcaattgatcagtcaggaggaatattacccctatggtggtactgccgtgtggatggcgcgcagtcaacgagaagcgagtgataaagcctatggctattcaggcaaggaacgggacgccacggggttgtattactacggtttccgctactatcagccgtgggctggccgctggctgagtgccgatccggcgggtacgatagatgggctgaatctatttagaatggtcaggaataacccgattgtactccatgatcctgacggcttggctccgggtttttttgagcgcatcagttcatttcggaagaaagacacattaacgatttcatccctcaaaggaaccgggccgttttatacccgttcagaaagcgagattgacatcgattttctgttctccagacaggatagggataaagactttccgccacagaaccacaaggaactttctgcggaagatcgtcgagaggtgttagaagtttcctcaggtgagaatatcacatcagccaataaatcctctaaatggtatgcaggaacacattgggaaactaaaccattaaaaaataatactgatctggtggttcttcacaacggtgtgcagggtgccgcagggattaatattaatctgaatgatataaaacctggccgctccgtgctggtgacggctgggacattaaccggatgtacgatgattaccggtgttaaagggaataatttttatgctttgcatgccggaaccggaaccccatccgaaaattgggtaaccggtgaacacggagtgacggataatttccgaatgctgaataagttaattccggatgccggtattgacctgaatccagaagccgtgaatgacagcttattaacgatattggattattttgataatggaactatcgcttacaacggtaagaaaggcagtgaaatacatagagatgcagataatattctaaattaccgaaccacaggttacgaaaataccgttggtgtatctttcagtctattaacaaaagacaaaaatggtgaggtgtcggcatcaacgttattagagcttggtgagctaaaaccgcataagaaacatagaacaagaggccagtttggaatgactgaactgaaatacgaggccagaaagaataccgtcgttaaattacgctgaagcactagcctgcctgatttaatcatttatttaataaggcaggctattttttcatcctcactatgttgtttttatattttcaaactgcgctatcaaaaatagccataaataatatggggtgtcgagcaacattcttttagtacgtaatcgtatagttcacatctatcgaacgtattcccattcatgtgctcgtttttttcatgtttaaccaggagatatttatggacatacagctgtttagtaaaaccccatcggtcacggtgtttgataaccggggcctaagcgttcgcgatatcgcgtatcgccgtcatcctgatacacctaaagtgacggaggaatgtatcacctatcatcaattcgattttcgcggttttctggctcaaagtttagatccaagactaaatcataaagaggttactaatttttcttatctaactgatttaaatggaaatatcatatatacgcaaagcgttgatgcgggtaacacgctagttctgaacgatactgaaggaagatccgttatagcgatgaccaatattagcagaggggagaatggtaaggacgacctcagtctggccgtcacccgaacctttcagtatgaaaatgccccgttgccaggccgtccactgagtgtaaccgagcaggtgaacggcgaaaacgcgcggattacagagcattttgtgtatgcgggcaatacgccgcaggagaagaatctgaacctcgccgggcagtgcgtcagttattatgatgcggccggcctgatacagacagacagcgtgtcattaacgggtaaaccgttatcggttagccgtaagctgctgaaaaatttggatgatacgaacatcttggccgattggcaggggaacgatacttccgcctggaatagtctgctggcgacagaaatctatactactgtgactcgcacggatgcggcgggtgcggtgctgacaaccattgacgcagtgggcaatcagcaacgcgtggcgttcgatattgcgggccaactgtcagcgagctggctgacgctaaaaggagggcaggagcaggttatcataaaggtgttgacgtactctgccgctggacagaagcttcgagaggaaggcggtaacggtgtggtaaccacttatacttacgaggcggaaactcagcgtttgatcggtattaaaaccgagcgtccgaacggccatgccgccggtgcgaaggtgctacaggatttacgttatgaatacgatccggtaggaaatgttctcagcatcactaatgacgcagaggaaacgcgtttttggcgcaatcaaaaagtggtgcctgaaaatgcctaccgttacgacagcttatatcaattggtcagcgccagcggacgggaagtggcgggagctggccagcaaggcagtgatttaccttcccctctcgttcctcttccctctgattcttcggtatatacgaactatacccgcacttatacctatgattccgccggtaatctaatgcgcatcagacacagtgcgcccgcgaccaataataattacaccctaaacatcaccgtgagtgagcgtagcaaccgtggcgtaatgagttcgctaacggaaaaccctgctgatgtggatgcgctctttaccgcaagtggaagccaaaagtgcctacagcaagggcagagcctgatttggacaccgcgtggtgagttacgcactgtgcttttagtggctcgcggcgaaacggcggatgacagtgaaagctaccgttatgacggcagcagccagcgtattttgaaaatcagttcgcagcaaacgaatcacagtgcgcgggtgcaacgggcgctatatttgccggggttggaatggcgaactatgactggcggcgtggcggaagcggaaaacttacaggttatctgcataggtgaggcggggcgtgctcaggtgcgtgtactacattgggagagcggaaaaccagatggaataatcaacgaccagatacgctggagctacgataacctcacctgtagcagcggtctggaagtggatggcgatgggctggtcatcagtatggaagaatattatccctatggcggaaccgccgtgtgggcagcacggagtcatatagaaacggcatataaaacagtccgatactcaggcaaagaacgggatgcaaccgggctgtattattacggtttccgctactatcaaccttgggcgggtcgttggctctccgccgatcctgcgggtacggttgatgggttaaatctgtatagaatggtgagaaataatccactgcggctcaccgatccggatggaatggctccattagattggctggatttggatacgactaatgcgtctagggatattgttaaggccatttaccaactaaaccagatagacgggcctcatagaggcgttagagatacttatcaacgtatgactgaaagtaccggaatgattttacaggagaccttaaataatgaggcggtgctaaaaggtataaaacagaaagacaaagaaaaaaaatcaagaggaatgaaatttaccaattcaaaattaaaaacctacgccgctcatgcgggtgttttaaatacgctgcaaccggatccggtttataaagatggttttctgaatcttcccggaagcttgggtaataaaaatacctttcccggtgtggaactgattgaggataaagtgaaaccgtcactgagtcagtatcatcctgataaactaggtaaaagtcaaagatggaagccagaatcgagcctggggtattaccgagtcgcagatacagaagcatttatcactggcatccgtagccaatataaatcatcgggaacagatcttcatgcggtggttgaagggcgaattcgggatcatcttttagcaaataataatgttttacctaaaatggccgggatcgccggtttacatgcagaagtacaggcgctgaattatattatttctaatcctgatattgaaggtggaaacgccgaaaggctcaacggcagttatatctttacccaaaggctggttggggatgtgaatcaagatttccccgcctgctataactgttccggaattatatccggtctggaaaacgtcatgaccggacgagtcaacaatgatgtaagactaaagcgtcgaaagtcattttagaccagcgcgcaacgttgaaatagggcctgatgtgataggcattatttttgttcaaatctgaatacgtaagttataccgctcccaatattgggagcgtttaattttcgggtattattattcccctaaaaatgtaacgaccgttgatatttctggcggcatgagggagggggtaaacgttttacgaagtcacccaaggttaaatggtgttttatttgatcggccagaagtattggcaacgaataggattgggggaattaggtgatgattcttgttgggagtcgcagccagtcttttgaatccagtcctgccgacgatatttatttgtgaaaatacatcgtgatagattggcctaaccagcaggtacggaaaatattaaaatgttgccgtaaggcaatgcgagcagatcctacaattattaatattgaagctgttatcggttaaaataatggttctaatttttggtggagccaaaccgtcttgctatattaggttttatgattttatgattttatgattttatggttttatggttttatggttttatggttttatggccgtatttcttatcgccaggcgttaccacgaccaatattaatgaatttcgtaaatttaaggtgcctaaaatatgttcattagttattttcattaaaaataactactacaattagaatctctcctcacggcaaagtagagtttattcccatcacttccccgtaaccttcagttacaacatttgcggaaagtaaataattatatacctcatgtccatattggcctacaaatttgtagaatgaaaaaatcggatattctcaggtggtcgtaaaattggtgtggccgacgtatattgccgatttttgaaagtatattccgcttaaaaacgttagcttctttcatgtttattacgaagttcgggtttatattttggcaagaccaccgctataaatatctgtctattcatctcataattttcttagccttttttcaggtacatattatgcctttataccctttagttcccaataatcgtcaggtttcaattgaaacacagttaattgcaaatgccactacgccggaagagcgcaccgaggttaaaaatctgtttgcccagataaagatgctgcacaatgttccagaatcgcagacggtggtgtcatcaggccggccaagtctaaaaaatgtcttgttgcatggattgttggcacaaggcggtatgccgttaacatccgagcgggccgctcctgtgctgatcgcaggacacggagctaatcctatagcccaaacgctggggcaggttcgaaatttacagcgggaaatcgcaaccactcccactcttctaaccgaagaaacaaagctgcgtatgccacgctatgcggtatttccacctaaaacaacgcctcaaccgccggttctggatgacgtcaaaattgttaagatgtttgatttttcctgtatgaataacggcgaaaatctgacttttgcacaaatactacgtcaaattggtaaaactttgaggcagccaattaccatgatgacggttgaaagtaagaatatagatagctggaataaaggccaagggtgccctacgaatcaggaaatagagaaagcgaccaatattaccgagaagattgattctattacttctcagcttttaactttattgcccggtagccagcctttggctattgctcaatatattgtcggacctttgctggaacacgcggctaatgatcttgaaggaaagcctacttcgccagaagaggaactgaatttattacagcaagtgactcagcaagccaaattcagcatgagtgccagcacgcatagtgaacagcaacgcttatataccaggccaatatctgaaccgaaactaccacaggtagagctgccaaagttctatctgaagaatggagttaaccatattaaactggcgctcaatggcaaacttcatgatgttcctctcgttgagcataaagggaaaagtttcgctgtgttgcctaaaggaaaaaatggcggagaacgccggcagcaagtctatttcagctacctttcgcaggagtggaaaacgactggcgatggtaaattcattcgctttagtaaattagatcagcgtgtggcacatgaactctcccttcattctcgccatcgccataaaactgccgacggcaacgccaacgtttacagcgtacgtaatcctgtttcatctcagcctcaacgattgcaggccattgaactctatggtcgattggtgccttatcgctacgatttggccagtcatgagcaatttgtttacgatgctaggcagccagaatccacgggtcataaagtagaatatgcgaatcaagaatggcacattaaagcaccggtctctctggacgtggtgcctgaagtgtctacggccatgggtaaatatgatattcaaccgctgcagttgaatgaagcgaagctttctgcgccaaaccatttcggtattcaacgtacccgtaacggaaagcaggtgattaagattgatggaaagcattattcaatttctcaacaaggaaagcagttgctactgggacatagaaataatattcctatcgagctgacatcaggggaagggagtaaggtaaagctggcattggcgaatacaggaacggcgggtaataaggcatttaatctggtagatctgccaataattggtaaatccttgaaggttcaaatggctcgtaaggttattaccaaatccttgccaattgctaaagctaaaattgaactgactcttgaagccatggataagcccgaactcagagaacaggtgaaattagcgcaaaaagcgtattttggcagagagtttccgcttaaaccacagaatgaaattatactacgtaagacgttgagtcatatcaaaaatgacttagagcgtattagccatcgtaatttcagtttcgacagtcaggtaggagagacaaatacggtggccgagttgtcaaaagatcaataccgtcagttgggtagaaatcctaatagcaaaataatcaatgtaggtcgcgacggttttcacacctattacaaaatgatgggaaaaagtaagcaagcggtggccgatgtactcattcatgagttgtctcacggtgcgccaaactcacttgattttgtgtatataggtactcggcagcagacgaaagtcggcaacgttgatgtgttcgaactgattaatctcggaaataacaatctcaataacccagatgcgggtcaggcaccgcaaagtgtatatgcgggaagcgatctcaaggatttcaatagtattaatacttcgggttcaaaaggtttgaagaatgctgactccattgcacaatatgtttcctttttgagtaaagcagaacgaaatcctgacgcttttaatcaggattatcagtctctgctaacggcagcggaaaaatccaatgacttccagcagcgtgtagaagaaagcgtgccagtcagccgcagccgtcgcgcggtagagtcgattcatcagccgccgtctggtcttctgttagctatagaaagagattctgggcgctatcacctctatcgaccactgtagtgttaatccgaatggctaaggttataatgctgtcatgacttctcgccggataatacatcatactttcttgtttatccggcgatgccaaaaaataaagagctaaaagatgacattatttatgtggcagataatgaagatgtattgccgatattcaatagtaaaaatacctgcatagcttgataaagtcgaaagtttgaattttcgtgaattaatacgacgagaagtcagagctttgcggagtatttaaccctatcgttcggtcttttcattgtgaagattgaaattagaatgattccaatataagaaataaaaaatgaatgggaaatagcaggattactcactatggcgaaattttattagttggctgccgaaaatacggcagcacaatgttaactgattagataagacaaaatagacatatatttaatggttaggcctctggcatggccgaagagtgatgtgttgatattttccactcattgccgtcccaggcataagtaaaggtataacgtgctgaaaccgttgatttatcggaaaaggtaaaggtataggtgccagtatcaacggctttattgcagccaatacgtatggttcggctatcaattttgccaacgggttttttctccaggaaatgctcaaaataatcgatacgttctgcgtctgtcaggcgtaccttattcgaaaccgtgggcagtaataccgcatcgcttaagtaattacctgccactttcttagcatctccggtctgcaaagagtcattccatttatcaaataaccgttcaatttgtaccgattcaaccttagtgcaattgggagccgttgtagccaaagcggaaccagaaatcagcagcagtgagccgaataagccaagtgattttttcatatttattcctttcttcagttagtttttcctcctgtcagaagtaacagtaataacctgagtaaacaacatggttttaatatagttacatttatttactataatttaggtaactatgtaattttatatattgaagtgaaataacatactgattaatttacagggtatgagtaaaaaaacaggaataaaaaacctaattatttttatttccgcccataaaactctattgacatcgagttttatggttcattatcaatatatttttgattgccatgctagaattcaatttggttcggttaatcaattgagttgcagattaatcatcatgataattaatgattattttatttgttatactcagcatttatagaatggaatatatatctttattgggcaggctaatttgatgaggggggtattttagaataagacttgattgatttcttatatcgctatcctgtttttgcactctctacaaccgagttacctagaaattatgaaaaaagtcattattgctactattttgatgctgttttcattcagtgcattggatcaggatgcggatgtcaataattcaggcgatgtattatctacatcaacaacggcggagataatcaagaaagactgttctggaaaaacgctaaagccgtggccagttttgcttgaccacgacaagggagacctatgacgatgacggaagcgcttgtctaagctaaaactgtgatgattgataaggtggtgtgggagtagataaaataatgcggtgagtatcgggagcatggatattcaagctgttgggaattgttgtcgatttgtgtatcttcttacttggttaactcgcagcgtagttcaaggatgatttatatgagttttaaaaatttctctgttttaatggtgttgtatttcagttttattttctctctgaacgctggtacgaatatcagccatgattggcactatgttcctccggaacccgcttcttctttggcaaagagcgatcgatcgtcgctagatgaagcgctggataatcaaaagaatagaaaagcgctgaagtgggagcttaaagagcgatatcgaacgtattccgagcagaaaatcgatcgggtaacaggagaagtggcagaggaaaaacaagggatagtgtttgaataaatttattgagatgagattggctcaaaatttcacgatgaattttatcttatctaactataaattataggtttttttctgatctacggtgttttggcaaccgttcgcaagtttttagctgtgaatactatttacagaggggttcatgactttgagagcctacgataagtcttaaagtaacccttgtttattgtacgtatatgttttgccacatatactgcctgtcgctaaccgccattagctcattatggaagagcgtacgaccatttcagttgtaggttcggggttcgagacctcgatggcggaccaaataaataagcaaactgggtttaagtcgatgacgggtacccctgagatgtccagtttgcttactcagattgatttacggcctatttatggattattaccaacggctgtttaaacagtgctccgaatattcatgcggtcatcgtataatggctattacctcagccttccaagctgatgatgcgggttcgattcccgctgaccgctccagctttaaataccacttcagccgtttaacggctccacgcaatcgagaaacggtaggccgttaaactctgttctgacatcagagcgacatcttctttatcacggtgataatgatcgacggcgatatcgccagtggtattttcaaatgtttttccgagaattcgtacaaatttatcccaaactgaagctcctttcacatcgagattccaggcttcttctacctgattggcagcagacgcagagacccataaaaaatgatttggaaaaactttagttttttttctccattatttttatacctttcggctgtcatttttagtattacaagaatggaggctaaactacgtgggtatgattaaaatcgtaaatccgaacactttattttatgcgctactgtgttcacttatctctctcgcaaaaaacaacctgcacagcctgtttttgatgacgaagtttatttgttatatagagaaaaatagtatgggtgagacgttaaagcggtgcgaaagtgttttttgcgggtgttgttaaatgccttagggatcgaattaaccttttggagtataaagttggtgatgttttctcttcagaacaaaatgagctttggcgtggaatatttcacgtaataccttgcgtaagataatgatggttttagtggaaaaagggctgcttgaaaaacatcatggttccggtatttatataagaaaaaaatcttcagcccaatgttaatacgctaaaaaattttttgagaatgctcagcaggcgagtaaaagttgtaccaataaagtgctctagtttatggtgataaaagccaatgcggatattgcttctcagctgaaagtaaaaacgggcgagcaggtttatcacgcgatattaaaactatcgctccgatcataatccgtcaactggctgtgaaagtgagcgatctccgctgctattttcatcattgaaaataggaatggctttcccatgatcgattatcttaattttctccctccatgccggtttttctgtttttaatctattctcctctgtgtttttaatcctgctttgatggcaggcttagtcatttttaacctgattgcactgattaaaggaaaaacagcttattaaatgggttttgtgcacaaataaagtgcgacgaggtacagggttaatcttttttttgtatttaaattactgatttttaagccaaattataattggcattgtaattgctaaaactatttcatcttgtataccagatgggataccaatcaatgcctatattaactgtagcggaatgggtcagtttttatcataaacagcctgaacggctgaacgcggcgcttcagcacatgagtaaagaatggcatagcgatgataatgcatggatttacttggctaatgagcaggaaattggttcgcaggtcaatcggctgttaaaggaaatcaattccggtggaaaaaaggccagtgatttccccttatttggcgttccctttgcgataaaagataatatcgacgttgcaggtatgcccaccagcgctgcttgtcccgcttttacttatttccccgaggaggacgccaccgtagttacccgcctgaaagccgcaggtgcgatagcgattggaaaaacgaacctcgatcagttcgcgacaggattggtgggaacccgttccccctttggtacggttgctaacgcttttaacgcggactatgtgagcggtggttccagttcaggctctgcctcggtggtagctcgcggtttggtctgtttttcgttaggtaccgatactgctggctctgggcgtattccggctggtttcaacaatatcgtcgggttgaagccgaccaaaggctggctgtctacgcgtggtgtcgtcccggcctgtcggctgaatgactgtgtgtctatttttgctttaagcgtcgaagatgcctattgcattgccgaactggcgggaggttacgatccgctggacgcctattcgcgcagacatccgcaaactgcatccgcttgtttcaacccgattccgcgttttgccgtgccagatagactggagttttttggcgactttcaggcggcagtcgcatttgaccgttcgttgacacgtttaaccgaaatgggggccgagctcgttgcgattgatttctctgcgttccgggcgttggccgaacagctctatcaaggtgcctgggtagcggagcgcacgctggccgttggggcgatttttcatgcgcaaccggaaaccatggatcctcaggtgcgcgctattgtcgccaatggccttaactacagtgcctgcgatgcctggcaggcggaatatactcgtgcggagctggcgttacgcatcaatcaacaattgagtcactttgatgcgctggttgtgccgacgtctcccaccattcgcactctttctgaaatagccgaacagccggtgcgcttcaacgcgcagttcggcacttacactcatttcgctaatctggcggatttaagcgcgctggcgttgccgggatattttcgagccgatggtctccccgccggaatcaccttgatcgccccagcctggcaagatcgggcgctgagtcagtttggcattctctggcaatcagcgctttcgcaaaaagttggtgcgatagggaaagtgctggccgcggctacgccgctagcggccagctgtcaccatgttcgcgtagcggtagtgggggcgcatctgcgcggtcagccgctcaattcacaattaacccgtcgtgcggccacttttgttgcagaaacccataccgccgcagattatcgcctttatgccttagccaatactcagcctgccaagccggggctggtgcgatcccgtcatggccagcggattgcggtggagctttgggatattccgctggcccattttggcgaatttgtggcggagattctgccgcctctggggataggaacccttacgctggaagatggttccacggcgaagggatttatttgcgagcctacggcattgaacgatgccacggatatcactgcctggggcggctggaaagcctggttggcccgtgatcaccgagcctgaggaggctatatgtttaattcggttttaattgccaaccgtggcgaaatagccgttcgcgcgattcggacgctaaaaaatatgggaataaccagcgtggcggtgtattccgatcctgatgctaatgcccagcacgttatcgatgcggatattgccgtggcgttgggtggggacaaagccagcgacagctatctggatatcgacaaaatccttgcggcggccagacaaagtggcgctgaagcgattttccccggatatggctttttgtctgaacgtgccgagtttgctcaggcctgcgaagacgctggcattgtctttatcggccccactgcggaacacattgccagctttggtttgaaacatcgtgctcgcgccttggccgctgcggtcgccatgccgatgacgcccggaacctcattactcgcaaccctgcgggaagcgcaaagggcggctgaggacatcggatatccggtgatgctaaaaaccaccgcagggggcggaggaatcgggctgatgcgctgcgataacgagggggttctggtagaggcgtgggatagcgttaagcgtatggggcagcagtttttcagcgacgatggtgtgtttatcgagcgttttatcgaccgggctcgtcatctggaagtgcaaatttttggcgatggaaaaggcagggtggtggcattgggagagcgggattgctcgctccagcgacggaatcagaaagttgttgaggaaactccggcaccgaatttaccgcaggctacgcgggaagcgttgtatgcctctgccattgccttgggggaatctgttaattatcgcagcgtaggaacggtggagtttatttacgatgcggccagcgatgcgttttattttctggaagtgaatacccggttacaggtagaacatccggtgacagaaagcgtcaccgggctggatttgattgaatgcatgctgaaaatcgcggcgggcgacgcgctggattgggaacgcatggttcagccaccgcgcggcgcatccattgaagtacgtttgtatgccgaagacgcgctgaaaaatttccagcccgcgccaggcgtactgaccgaagtctgtttccccgaaaatgtgcgcgttgatagctgggttagcagcggaagtgaagtcagcgtgttctacgatcccatgatcgccaaaattattgtccacggtcaggatcgccatcaggcgctggagcggctggtaattgccctaaatacgacacgcttgcatggcattccgaccaatctcgattacctgcggcagattatcggtcttgccgaatttaaggctggcgtgatgtggacgcgtctgctggatagcgtggtgtaccaggctcacagtatcgaagtgttggaaccgggtacctggagcagcgtacaggactgtccggggcggttgggttattgggatatcggcgtaccgccttctggcccgatggatgatttcgcttttcgtctggccaatcgtatcgtcgggaaccatccatcatcggcgggaatggaatttactctgcaaggcccaaccctgcgttttcattgtgatgccaccattgccttgaccggagccgactgtccagcagcgcttgatggtcgtgtcgttccctattggcagccgctgatcgtgaaagcagggcaaatcctgacgctggggcgagccactcgcggctgccgtacttatctcgcggtgcgttacggcctggatgtaccggtctatcttggtagtcgctcgacgtttgctctggggcagtttggtggtcacgccggccgtaccctgcgcgtggcggacatactggcgatatctcggcccgatctggcagcctgtaccacccctgcgccgattgcgctgccgcaaataccggagccagccctgatcccgcagtacggcgacttgtgggagattggcgtgctgaacgggcctcacggtgcgccagatttattcaccgccgcatcgatggaaaccttctttgccagcgaatggctggtgcattacaactcaaatcgtttaggggtgcggctggtggggcctaagcccgaatgggcaagagctgacggtggcgaagcagggctacatccgtccaatgtccatgactgccaatatgccattggttcagtgaatttcaccggtgattttccggtgattttgactcaggatggccccagtctgggggggtttgtgtgtccggtgaccattgctaaagccgaactgtggaaagtcgggcaggttaaaccgggcgaccgaatccgttttcgcagggtgacgtttgagcaggcgcagtctctggcgtccgcgcaggacgcggcgttggctgatttacaggccatgtcggcaccagtctcaacgggaaaagtatcacccattattgaaccaatacatacgcgaagtgcagcgatactggcggaattaccggcacacaatcaatgtcctgcggtgatttatcgtcaggcgggcgataactacattttgattgaatacggcgataacttgctagatttggcgatgcgcctgaggatttacctgctgatgcaggcaattacccaaagtgaaataacgggtattgaagagttgtctccgggggtacgttcgctccaggtgcgttacgacagtcagcgtttgacgcaaagccaattaatggcgctgttgctgggtttggaacaaacgttggaagacgtcacttcactaaaagtaccttcccgtatcgtgcatctgcctatggcgtttgaagatagtgccactctggcggccaccgaacgttatcaacaaaccgtgcgggccgaagcgccgtggttgccgaataatgttgatttcattcaacgtatcaatgggttatccagtcgtgagaaagtgaagcaaatcctgttcgcctccagctatctgattctgggattgggagatgtgtatctcggcgccccctgcgccgttcctcttgatcctcgtcatcgtttactcagttccaaatataaccccgcgcgaacctggacggcggaaggcgccgtcggtatcggcgggatgtatatgtgcatctatggcatagattctcccggtggctatcaattggttggtcgtacgctgcctatctggaacaaattcctaaaaaatgagcaatttggtgatgaaccctggctgctgaaattcttcgatcaggtgcgtttctatccggtaacggaagaggaactcaccgcgtttcgccgcgcttttcgcgaggggcgagcgcagatacaaattgaagaggttgaattcgattttgccacttatagccgatttttgatggaaaacgccgacgacattgcggcattccgccagcgtcagcagcaggcattcaacggggaagtggctcactggcaggcacaggaaagcgcagcggtcgaaagcgccatgctggcagaggcagagataaccgaagacccggatggtcatttggttagcgccgacctgaacggcaatatttggaaaattctggtggaaccggggcaatgggtgaagcaaggagagccgttgattgtcgtggaggctatgaagatggagctgatggtcgtctcgccctacgacggcacagtgatgcgaattcactgccagcaagggcgggcagtcgagccgggggatgcgctgctgtggctggatattgccagttgaagatgcgtgttattgccaaaatcggagactccaaatgatgtcgaatgccagaaatcagccacggccggaaggaatagctgaacgggtttaccgcttactgaagcaggaaatcttcgattttcagctattacccggcgatcgttttagcgaaaacgaagtggcggtgcgaatgaatgccagccggacgccggtacgtcaggcgctgtatgcgttggaacaagagggctacgtggacgttcaaccgcgcagtggatggcaaatcaaagcggtggatttcgattatctggaggcgctgtacgacctgcgaattgtgctggagctagaggcggtgaaacggctgtgcgccttatcgtcggccgtttgcccgccgcagttacagcgcttgactgaattctggatcgatgacccacagatgccgaaaggcaaagatgtggcgtctcaggatgaggctttccatatgacgctactggatgcggcgggaaaccctgagatggcgcgggttcatcgggatattaccgacaagattcgtattgtgcgacgtctggattttactcagcgctcgcgcatcagtgcgacttacgccgagcacggtcagattctgctcgctattttaaaccgccaactgcaagaggcgcaaaatctgttacaccgtcacatttccgtcagtcaaaaagaagttcgtcaaatcacgctccacatgctgcatcaggcgcggcaggagaaattgggttaattaaggctctcagcagacttttcaggggtgactgctatgcaacatcgtatctttattaaagcgttggcgttatccgcatcggttatcagtctcgggctggcttttagcgctcacgccgtcgacaccatcaaagtgggaattatgcattccttgtccggcaccatggccatttccgagacgccactgaaagacgtggctttaatgaccattgacgagatcaatgccaaaggcggcgtattgggtaagaaactggagccagtcgtggtggatcccgcctccaactggccgctgttcgcggaaaaagcccgccagttgctggctcaggacaaagtggccgtagtctttggtgcctggacgtcggtgtcacgaaagtcagttctgccggtatttgaagaactgaacggactgctgttctatccggtgcaatacgagggggaggaaatgtcgccaaacgtattctataccggcgcagcgcctaaccaacaggctattcccggggtggaatacatgatgagcgaagacggcggcgcggcaaaacgtttcttcctattgggtaccgactacgtttatccgcgcacaaccaacaaaattctacgcgccttcctgcatgctaaaggcgttcaggacaaagatattgccgaggtgtataccccgtttggctacagcgactatcagaccatagtttcagatatcaaaaaattctccgccggtggcaaaaccgcggttatttcgaccattaacggcgactcgaacgtgcctttttataaagagctggctaatcaagggctgaaggcgacggaggtgccggtggtggccttctcggttggcgaagaggaactgcgaggaattgataccaggcctttggtggggaatttggcggtgtggaactactttgagtcggtggacaatccgatcaataaagcctttgtgtcccaatggaaagcctatgccaaggcgcgtaaattgcccaatgcgagcaccgcagtgactaacgatccgatggaggcgacatacgtaggtatccatatgtgggcgcaggcggtagacaaagcgggcagcaccgatgtggataaagtccgtgcggcaatggcagggcaaaccttcaaggcgccgtcgggctttacgctcaccatggatgccggtaaccatcatctgcataaaccggtcatgatcggtgaaatcgaaagtaacggtcagttcaacgtggtgtggcagacggataaacccgtgcgagctcagccgtggagcccgttcattcccggtaacgataaaaaaccagatacgccggtaaaaacccgcgcccactgattttgtcaccgccaaactcgtccctcccactgtgggagagggttatcctttcagggagaacataaccatgacacctgctcacgtgttccgatgtctatttttggtcatctggctactgccctgttgcgctaaagcgggagacagcgaggattttgcggtggcgaaccgtacccagcaggcgaaattactgcaaagttgggctgcggcaccgcagaaggttcgcattccgttgctgaaggcgttagtacaggaaaaactggtggtcgatcggcatcagcggccctttagcgaaacgggtacggctttgattccacttggtgaagccaaaacgccggtgggggaaacccataaagtccgtctgactaaccgcctacgggtattggcgaggagcgcgctggcaactcatcaactgatcagtgacagcgccaatgacagattgaaagcggcgctagccttacaaaaccacgccgattctgaattattgccgctattgcaacagcgtttgcgtctggaaagcgacggcggtgtgcgcgatgcgctggaggcggcgctggctcggttgcaactcgccagtccggatgccgcaatacgactccatgcggtaactttactgggatattccagcgttccttctgcacaggcatggctggaacctttggctgataagcagtgggaaagcgatccgaaagtgcgtgccgctgccgccgacagcctgacgaaaatacactatcggttgaggctgggagatcttctcggacaggtctttatggggctttcgctcggctccattctactgctggctgcgttgggactggccattacctacggtttgttgggcgtgattaatatggcccacggcgaaatgctcatgctaggagcctactcggcctggctggttcaggggttctttcaacaatttgcgccccactggctggcatattatccgttggtggcgctacccgtggcctttgtgattaccggcggtattggcatggtgttggagcgcaccattattcgtcatttatacggtcgtccactggaaaccctgttagcgacctggggtatcagcctgatattgattcaggctgtacggatgctgttcggcgctcagaacctcgaagtggccaatccggcttggctgtccggcgggattcaggtattgccgaacttggttctgccgctgaaccgactggcggtattggtttttgtcatgctggttttactgttcacctggctgctgctgaacaaaacccgattgggcatgaatgtgcgagcggtgacacagaatcgtgcgatggcggcctgctgtggcgttgccaccggacgaatagatatgctcgcttttgggctaggttcaggcatcgcgggtttgggcggcgtagcgctttcgcagttgggcaacgtcgggccggagctggggcagggctatatcattgactcgtttctggtggtggtgctcggtggcgtggggcaactggcgggtagtgcggtagccgcatttgggctcgggtttttcaataaaattctggaaccgcagattggcgcggtgctcgggaaaatactgattctggtgctgatcattctgtttattcagaagcgtccacaggggctgtttgccgtgaaagggagggttatcgactaatgagacagccaatcatgtccgccattgcccgtaaagcgccgcggagtatcaaattactgggcagtttgatggttttactcatggtggcactgccgttactcgcactgttaccgaatattcacccaatgaatatttctacttataccctgatgctggtgggcaaaattctttgctacgccatagtggcaattgcgctggatttggtttggggttatgcgggattactgtcccttggccacggtattttcttcgctctgggggggtatgccatgggaatgtatctgatgcgacaggcggcgggggaggaattaccggcgtttatgtcctttctttcctgggatcacttgccgtggttttggtggggaactcagcattttgcctgggcgatggcgctgattgttttggtgccgggattactggcattggttttcggattctttgcctttcgctcgaaaatcaaaggcgtttatttctctatcatgactcaggcgctgacctacgcgggcatgttattgttttttcgcaatgagacaggtttcggggggaataacgggttcaccgggtttaccaccttactcggaatgccaatcaccgcaacgggcacccgcattgggttgtttattgccacggtattgctgttggtcggcagtttaggcatcggttttatgctggctcgcagtaagtatggtcgggtattaacggcggtgcgtgatgcagagaatcgcctgatattttgtggttacgatccccgaggtttcaagctgctggtgtggacgctttcggcagtgctatgtggcctggctggtgcgctttacgtgccacaggtgggcatcattaatcctagtgaaatgtcacccactcattccattgaagcggcgatttgggttgccttgggcgggcgcggcacgctgattggcccggttatcggcgcagggttggtcaatggagccaaaagctatttcaccatggcggtacctgagtattggcagttattcctcggttttatctttatcgccgtcacgttgtttttaccgcgcggcgtgatggggttattccgtaaaggagacaaataatgcaacccgacgaaccgctgtttacccgccagcatttggccgatcgctatcgtgagcaaacggacccgattctacagctggaaaatattaacgtcagttttgatggttttaaggccttgaccaatttgtccctcaacattggcgtgggggagttacgctgcgtcattggcccgaacggcgcggggaaaaccacgcttatggatgtgattagcggtcaaaccaagcctcaaagcgggcgtgctttttacgatcagtctaccgatttgacgagtcttgaaccgatagatattgcgcaaaaaggtatcggccgcaaatttcagaaacccacggtgtttgaggcgctgacggtgtttgaaaatctggaaattgcacagaaaagcgataagtcggtgtgggcctgcttgcaggcaaaactcagtggcgaacagcgggataggatcgacgaaatgttaatcacgctgcggctatccagggagcgcatgcaactggctggtttgttatctcatggtcaaaagcagtttctggaaatcggcatgctgttggtgcaagaaccgcatttattgctattggatgaaccggtcgccggaatgacggatgcagaaaccgaatataccgcagagttgtttcgctccctggctgggaagcactcattgatggtggtggaacacgacatgggatttgtggaaaacatcgccgatcatgtcaccgtgctacatcaagggcaggttctggctgaaggttccctgcgagaagttcaggccaatgaacaggttatagatgtttatctggggcgctaaggagcaaatatgttgcaggttaacgaactgaatcagtattacggcggcagtcatattttgcgcggcgtctcttttgaggcacaaatcggtgaagtgacttgcttgctggggcgcaacggcgtgggtaaaagcactctattgaaatgcctgatgggattgctgccggttaaatctggcagtattaactggcaacaacgcaatatcactcagcgcaaacctcaccaacgagttcaggcaggcattgcttatgtgccgcaggggagggaaattttcccacgtttaacggtagaagaaaatctgctaatggggctatctcggttttctgcccgggaggcaaagcaggtacccgaagatatatatcggctgtttccagtgctgaaatccatgcaatatcggcgtggcggcgatctttccggaggtcagcagcaacaactcgccattggtcgagcgctggcctgcaaaccgcagttgctaatattggatgaaccgacggaaggtattcagccttcggtgattaaagaaattggtggggtgattaaacagctttcatctgagggcaatatggctattttactggtggaacagttttatgattttgccgccgaattggcggatagctatctggttatgtcgcggggatcgattgtgcaacagggaataggcagtgaaatggcgcagcagggcgttcgagggctggtagcgatttaaatgtcttcttaattgaatgcgaatatgtgaatcacaaaggattgaatcattcccaatgagggggacggaaagtaaagacagtgaagtatgagttcagtttagttatctgatgagtaaaactatcatttgcaggcaaacctggcgatggtcgatctctaatataatattactgagtttaatttactattctggcgctagtgtccaatgacgcgcgtatctcatactgagaatcaaatacaaacgcagatacaattcaccggtttactggaaatcagattattgtgcgggaaaatgttgttgcgcattgctacaactatgaataccagattacctgataatcatgcgggtgaagtgaggttacccggaaaagttgcagctatacggattgagatgaaattatattagccctagctgaaaatttcttattgatgaatggaggatgaaaatcgagcggaatatgcgttttttttcggctagaatgaattgatattgataatatggttcgttattgcaacgattaagacgaagcgattaacaatttatttacatgtattattaaatgctacagaagccgaacttgcacaaacgaatgtacttctgtaacatttttctttgttatagatatttttttccctggtgttggctaatattgccccctgactacgtactacgtgtagtcaggttttttttatcacccaatcactaagtttcaaattatacagatgcagacgcgatgcgatagctgtactaaagtgtgatccgatactgtacttttggacagaaagaccacatgaaatttaaagggatgcagttagactttgggagaaggagaatgttttttggtgtaaaaaatgatgaaaggataattgagactctacgggattatatcgacagaaagctagccagctacgattcgcccagatatacctacatggtgattgataaaaagaatcccattgatatattcatggtgtcaagttatccaaatgaatgggttgatatctaccgaacccaaaactaccagcatatagatcccgtggttctgacagcgtttaaacgcacctcaccgttttcgtgggatgaaaatattaccatcctctccgacttgaaatcatccaagattttcgctttgtcgaaaaaatataacatagtcaatggatttactttcgtgctgcacgatcacatgaataacttggctatgttgtcgctgattatggaccatagtgatggtaaagagctagaagctcagataatcaatgactcagagcggctgcaaatgtgtctgattaatattcacgaacagatgctgatgcttggacaaagtacggtgcgtactacgaatgggaaacctgcggacatcacgagtaaagccattttctctccgagagaaaatgaggtgcttcactgggctagtatgggtaaaacctatcaggaaattgcgctgattgcgggcattacgccccgaacagttaaacatcacatgggcaatgtggtgaaaaagttaggggtgattaacgcccgccaggccatcaggctgggagttgaactggaattgattaagccagttctgaaataacgggcagcgaaattggccatgctcgtagcgctgagtctggcccctgtaaaaatgcatttatctgcgatgccatcaatgcctgattgtgtaagtccgttgggagattgagtagataaatacgttctttttcgctgacgaatgcttctttaataatctctatctgccagccagagcgtttaagtatggttagcatggcgcggctaactatagtgtaaatacccgtatgaccgtggtgccgggtataattaatcatggcaaggaagagcacatagcttataggatagcggttacctaaaagcaactttgcacgggttttatcaacaaaaaatcggcttgattcgatatagttattgtcaggtaaggtaatatcgtcgaagagagcgttaaaagtatgagttatcatattcggccggttcaactcaataaaacgcacgctgcaaattagctggcttccgtatatgccgagtagataacgagtgtttgggttatcatattcgtcaaactccatgtcgttgctgcattttacagcccactgtaggcgatctttaaaggttttttttctcagtctgtaaagatcctcagaccgcatattcatcagctcttcatagctgacatcgaaaatttctaacatttaatttcctattatttaatacagttgaatttctatatagggtaataaattttatcatcagaaaagccggttgtcgcgatcaggaatagcgctttatctatttcttgcttatcggcacaatcgggtcaatataataatattttttattagcggagccgcagtcgatgaaccatcgaggcgatgcaaaaaaccgcgtgtttacctgtttcaccgttgatttgtcgccatacgggcattaattctgatgtttatttcattgcccaacggcatgatggttacccatatggttaagtttggcatagacaaatagaccaaggttgatatcaccctatttcagaggttatggcaaagctttacgggcagtaccattacgacgtatctgaaatattagatacgattggtttatctcacgtccatcgcaaatacaataacattggtctgcgatgagctaaacgaattttacaaagctagctgcgaataaaattgttactgaaatttgttgctacaatgtatcaaaatttctcctgcgatagggagcggcaccgccaataataaaatattggccggtattatcgctattccacccagacgataatgagagtatatctcaccccatattaaccaaagctataccattagcgcacgccatgcataggataaaggcacgacgaacagtaatgcgggtaagaaattaactacggaaaatatcttgatctgggcaatacgtaatccaacggcgatcattataataccgccacaggctgagaaatcagcgaaggcgatttcatccatatagggcatgatccaaacggcgaggccaaaaagtaagctctgaagcaataattgtgggactgcgataaatatcagtgccattcccaaagagatggcaaaaatcatcgctgtaaagaaatccatcatcgatttgaccaagagtaattggtaattcccgcttaatccctcggttaaagcaccgacaattcccagcccgcttgcacaaaacagcacgatcatcgcggtataactttgcgcaaactcctctgcgggtaagggactacgcgttttgatcactttggaaagtatgcgttgtaaaaactctgcgcactgtttgactccacgttccagactaaacagttcgccaaatgttgtgcccagaatcaatgccagaacaaccgctggcatgtattgcacctttattatcatgacaacgccgatgcaaatagaagagagagcaaaaattgctggtaacccttctcgcaaacgtaatggtacatgtcgtgctaaagcaacgcccagtaagccacctaaaattattgccgcactattaatccagggtcccagcatggtatgacacctcttcattcttatattcggatttattaattctagcggaaataggtgagtaatgtggggattgctgtgctacttcgggatagatagttaattttttatcaaaatttaattatccgttggcgcagaaagcaaaaacataaatagtactaaagtaaacttggttacagccgatatttagaacgcttagttaaaaccgaatagacagttcgtctgtcgagttagaaatttaaggatgaatgtaatatgagcaatgtagacattggaagtaatgagaaaccagaccattcgattaaaaataaccgatttcgtggatacaataaatcttgggaacgtaaatttttgctaatggataagcttggctttcgcgacgataaatacagtggcgatcagactcttgctaaacagttagcctttggagatcgttttacgatcaattttaatgcttgggcgctgctgtttggatcggtatattactttatcaagggaatgtggcagaagggcttaatcattatggctgccggaatactcttttctgcttttgcaattttcctaggttatgagcgacaggcgtaccttattccatcagtggtgacggctttgatggccaatgttgatttctatcgcttaagccggtttaacgaaaagatatggccaaaattccctgctatattcggtaagattaaattttgcctgctggtattggttttttcattagtcattggcgtaatgacggtggtggccagcgaacgagccgagctagaaacatcggcctgctcggttttaactgaaattcttcaatggcagttagatagtaatgcaacctgtaagaaggtaacgatcgatgaggaagtgacggaagggttctatcgcgctcacgccgtgctggataacggtaatgaaatgcttatcacgctggagcagcgtaacaaccagatttatgtggttgtgcctgagcaataagccgtttgatatcagatgaattcactcactcagcgctcagtcagttatctcgctgagtgaggaaccgattagctttccgtcaaaggtcaagctcgtaggttttttccagattagacgactgtatcaaattaattggcatcgtaatcttccctttcctgtctcctacctgaaccaaaaatgttattgcccaatgattcttttagtcaaaatgaccgtatttttagggatcaaataagtttggttctatggcgcaggttttatggctaacactccattgaaatttgctagctgtgtactgtttcttaatctaaatacgttgataaagataaaaatctacatagtactaataccaacccgacagataatcccgtatcccgtatcccgtacccactgtaccagtgccactattatcagcgcgacgaccataagtcagaatccggcagttttgcaacctattacgcaggtgagtttattttccctgctgctagcatattgcagtaatgactcaaatcgaatgttattggatatcatggtatagccagtaatactgataaaactggtaggtaaagataaatcgactcccaacagccttaagacaaaagcgaattttctaagttggggaaataaaagcagtgagataaactgaatgagtagcgagcaggatactgtccagcggttatcagcattaattgagtcatttcttgtggtataaggctgagctcatcagcctccacatcaataattttttcttctaaaaatagaaatataagcacgtacaggtttatcaacaggcaaaaccacactaaatatgtgtatttttcatgaactaattccatttagatacaaaagtatgaagtgattatcgaatagatgaataataacgaaattgacctaacgtgtttttttattttgttggttcggatctttattaataccatggcaagccggaatggttgccaccacgagcaagattatccgatcgttttcgggcacaaggtttttgtaatgaggagatttggtttggcaattcttctatgtaaggggacttattgcataactgtgcgggatagatgtgctttcctttacattcatcagtttatacgcgaaaagataaacgatggtgttgttgggaatgataatttgatgaataatgtgccagataatcttccctgatgagatacgtgtaaatgttacgcattttagtgacccgaattgatttcctcggggatatggtctgcaccacagcattgattcgcgcgcttaaacagcattggccagaagctgaaattcatgtgctggccaataaatataatgccccggtactggatcgtaatccggatgtcgctgcggtacatacctatgtgtacagtaaacaatgtgagcgtaatcagcgcctgggaaaattaaacgctttaatagatcgcttagcgctaatctggcgtttacgtcggttgcgttttaatctggcgattgtccccaatgggggcgtgagtaaaaatagtatccagtttgtccgacagttaaatgttgccgattgtcgttggcatacagctgagagtgaatttgacgatcgggttgcgtcccacgcagctagccggccaatgaagcatgagtcattatctggatttacgctgttacctgagctagcatccattgatatcaatgcgctacggctttatgtctatcctgagccgcagttacaagctcaatggcgaaattggtttggtgataaaaataaacccaggattggattatttatttcaaataagtcggtcgatcgtcgctggagctggcagaaatggcacgatgtaatcattggccttgagtccaaaaccgagctatttattttccacgatcctgcagaaaaaccgacggatgaacaattggctcatttacccgctcgttgcctttctaccccttcggtacccgatatgatagccgccatgagtcaattagatttggtggtttcggcagatagcgcccctattcatttaagtgcagcattacagattccggttgtagcattatttgaaaaccggcctgaaaaatatttacgttggtatccattgggtgtgccgcatattttattgcgagaagggagacaggttgaggatattcaagctcaatcggttattgaagcggttagctgtttattagatagtaaaattccgccattggaagaaagcggctttcattaatctgtcagcaaacttttagccagtaacttcgacgcctcgcataatgcggggcgtttttattggtatcagtgattcctaaaatgagataagcaaaggaaaacctttggactgactaacgacttgtaaggtattaccaatactaacagtgtgattaatagtttgttttttgccagtattcactcttacgcctaagctagaaaggttcaacagtgtcttaaacataaacatggaggagttacgtttgatgcgtttatctacgttggttttagcgatgagtatggcactcgccgggcaggtccaatccgcagaaatagcggtaaaggggcagttaaataaacctcagttggaagatgaagctaatcgggtcggtcaaaatccgttctttagctcgagtaaactacctttccaggcaccgccgtttaatcttattaaggaaagcgactatgcgccggcgattgaatttggaattgccgaacgtttggcagaggttaatgctattgcaaataatcctacactgccaacctttaaaaatacctttatagcgttggagaaatcagggggaactttaacccgagtgatgaacggatttggcgcaatgacatcggccaattcaagtgatgtcctgcaaaaaatagatgaagaaacctcgccaaaactggcggctatggaagatgctatcaagctgaatagcacactgtttaatcgtattaaaacaatatatgaccagcgagataaactcggtctggacgatgaatcgagacgtttggtggaagtgacttacactaacttcattctggcaggcgcgaatctttctgatgcggataaaaccaaacttaaagctttaaatcaggaagcggctggtctgagcactcaatttaccaataaacttttggctgcaaccaaaaacggtgcggtggcagttaaagacaagtctgttttagcggggctgtcagagggggaattagccgcagcggcgcaggctgccggcgaccgtcaactggataaacaatggctattggtattgcaaaataccacccagcagccggtgctaaaaaatcttagcgaccgagatacgcgaaaatcgttgtttgatgcatcgtggaatcgagccgagcagggggatgccaatgacactcgccagatagtatctcgtttggcaaaaatacgggctgaacaggctcaactccttggtttcccgaattatgctgcttggaaattacagaaccaaatggcaaaaacccctgatacggcactgactttcatgcgtgatatcgtaccggctgcgaccgcacgtgccgagagggaagcaaaagatattcaagcggttatcgatcgtcagaacggtggatttaagctggggccagaagattggaaattctatgcggaacaggtgagaaaagaaaaatatgatctggatgaatcacaaataaacccctactttgaactggacaatgtactgaataacggcgtgttttacgcggcgaatcaactgtttggtattagttttaaagaaaggacagatttgccggtttatcatccagacgttcgggtttatgacgttattgataaagacggtcagcctttggcgttgttctacaccgattatttcaagcgtgacaacaaaggtggcggtgcctggatgagcaattttgtcgatcagtcgaaattgttaggtaccaaaccggttatttataatgttgctaacttcacaaaaccggctcctggacagccagcattgctgtcatatgacgatgtcattacgctgttccatgagtttggtcatgccctgcatggcatctttgccgatcagcaatacccaagcctgtctggcaccgcgacggcgcgagatttcgtcgagtttccatcacagttaaacgaacattgggccagcgatccaaaagtgttcgccaactatgccaaacattataaaaccggcgagccaatgccgcaggagttagtcgataagattcagaaagccaaaaaattcaataaaggttatagcatgaccgagctgctttctgcggcattgctggatatgaactggcatatgctaaacgccagtcagctggagcaggatgttgataaatttgagaaaaaatcgttacagcgagataaaattgatctgagttatgtccctccacgttaccgttccagttatttccaacatatctggggtaatggttatgccgcaggttattacgcatatttatggactgaaatgctggccgatgatgcttttgttggtttattagaaagcggtgggctaacgccggaaaatggtcagcgcttgcgtgataaaatcctatctcggggtaacagtcaggatctggaaaaactttatattgattggcgcggccaagctccaagtattgagccaatgttaatcaatcgtggtttgaaggaacccgctaaataagccaatcttgtaaatagctaattggggaatcaacattcttcgttatagccagtgatttatgttcctaccgcggggcagtttgtatcagattgccccgttctatctgtcagtacatttcatccgcatatatcagccgttgcattgaacaatgagatgcggatctcatagctcgaatccgtccattgaatgaacaacctcattaccttaatgtacactcgttttctatttattctctcatatttagttgctaacaaaactactctcacgctaatagtatgtttgtggatgctactttcccctagctatattattttataaattccactttggttaatatatttacctgcatttatgcttatttgaagcgtatggcgttaaatcggggaaattaactaaaggaatacaatctacctccgataagcacctcatattattactctaggggtttgtttttaatgtttaaaaaaatgagaataagtgttggcttatctttgattatttgtgtgtttagccttgcgctgcttggggtgagtggttttagcatgcaggctttaaccaatagtaaaggtgcaacgtttagaattgaccgtattcaaggcgatcaattggtgcctttatatttaatctattctgagttattaaatacccgtatttacgcgcaaaatgccgcattactgttggaagcgaaggcagacgccggggccgatttattgaaggcacaggattatcttaaatcatctgaaaaaaacatggtcgctttaggtaaaattgtgtcattgaccgcagaagggcggcggttacgtaagaatattgatacgacttatgctgattacattaacaatggtatcaaaccaatgatgcaaacattgcgtgatggtaatgtggctgcttattacaatctaggaccgagtgttgttcctaaaagtgaagctttacgcaatagtttgtctgagttcgaaacttttgcaaaaaatctgggcgaaaaagaaatcgagggcgtaaccgcttcttatcgccaaaatatgtggattattggcggggcattgttgttgacgttaggcttaatccttatggccatcagatttgccaaacagattattttttccccgattaatgaagctcgccagctatttggaaagatatcccgaggtgatttatcgagtgttattccgttacagcccgctaccgaaatgggagggttgctaaccgcgttagacgatatgcagcaatcgctgaagggtattgtttcaggagtgagagaatcatccgccgttattactattgggacgcggcagatatccgccggtaatcaggatttctcatccagaacggaagagcaggcggcttcgattgaacaaactgccgccagcatggagcaactgacttcttcggttaaacagaataccgacaacaccagactcgtcacggcgatggcggataatatggcagtgttggcgcgcaaaaatggagaaaatattaccgatatcacggcgaaaatctcagcgattaacgaaagctctgagaaaatctccaatattattggcgtgattgactctatctctttccaaaccaatattctggcgctaaatgccgccgttgaggcggcaagagcgggtgaggcaggtaaaggttttgccgttgttgcctccgaggtgcgtaacctggcgcagcggagtgcagtatcagcaaaagaaataaaagagttaattgaagactcagtcagcaaaatcaaagagggttctgatatggcctcacagtcgggtgacgatatgaaaaccctgctgaatgaggtcgatcaggtgaagagcttgatcgacagtattgcttttgcgtctgacgaacaaagccgtgggattgagcaggtcaatattgcgattgtgcagctggaagaagtcgcccaacaaaatgcagcattggttgaagaagcctccgctgccacgctatcgctcgctgaacaggccgatactttagacgcttcgatgcaggtttttaccttaaccaaagcgcatgaataaccttcgctattagttttatcgaaaaatctgaccgccttatggcggtcatgatcattgaaatcggcgggctgatcagaggggcagttttaatgaatctcaagtagggttccaatatttttttgaaatttatctgtattttttaattgattaacgtcaatgtaaagtctaataatgatttataatatgttgtttatttattatttcatgcttggtatattgttagttcattacttatttccctctatcatgccattttaattcctgccagtaactttaattacataacgcctaaataacttatttaaactaaacttgtcgattgtttcacaattacgttacacgtttatttaaatgctgttcttttcgtttttttaaagtgttagtttatctgcaagttgacaccagggctaagtgggattttattgagtgactgtccgtgagatgttttattgtctgacaatatacgatgggatgaaatgaaacctcgtagccgtttcctatcttatccaggaattctaataatagcaggttaaaatgaaaagaataaatcaggatgtaatttgttctaatagtgaagcaactgaaagcaatgggaccaaaacactttccatgaagttattcggtggtatttcaaacagggatatcaatgcggtacctttggctttattcattgctattgctgccattgtcgttacgtcatcttattctaatcttttgccaaaaaacatgattggcggcctagccattattatgacgcttggctttattctgtctcacattggtcgccggattccagtactgaaagatattggcgggccagctattctgtgtctgatggtaccttcggttctggtctattttggcgtatttcagaccaataccttagataccgtacatctgttgatgaaagaggccaatttactgtacttcgttattgcctgcctggtcgtgggtagtattctggggatgaatcgcgtagtactgattcagggcatgatgcggatgtttattcccttggtagtgggaactctcgctgcggtggcttccggtctgctggttggaaaactgttcggctatagtttctatcacacattcttctttattatcgtaccaattatcggtgggggtattggcgaaggtatattaccgctgtcattagcttactcggcaattttgggtgagtctccagatgtgtatgtggcgcaattggctccagcggcagttgtgggtaatattttcgccattatttgcgccggagtattggccagaataggctctcgtcgtaaagatctgaatggtgagggtatgctgattcgcaatgcagaagacaatgcagtatttacttcacaagaagggccgcaacaagctgacttccaattgatgggcggcgggttgttaatgatttgcgccttctttatcgttggcggattatttgaaaagctggtgcatattccaggccccgttttaatgattctgattgcagttctgtgcaaatactgtcaggtcattccggctaaaatggaactgggtgcgcacagttgctacaagtttgtttcaaccactttggtttggccgttaatgattggtttgggtatgctgtttgttccgctggaaagcgtcgttgcggtattctcgtttggttatatcgtagtgtgcggtgcggtggtgctttccatggcaaccattagcttctttattgctccgtatctgaatatgtatcctgtggaagcatccattgtaaccagttgccatagtggactgggcggtactggcgatgtggctattctttcggcctctaaccgtatgtcattgatgccttttgctcaaatagcgacccggattggcggggcgtcaacggtgattggtgcgacgttattattaggatggattgcctgattgcaggagtgaaaaagccaccggtgctcaatgtaaccggtggtttttgctacataggggttattcgcagtattgctgcaatgccggaagctggtcaggcattaatcggtaaaggtatacggggcgccctgtggcaccgtagagaacgtgaatactcaatactgccgtttctgacaagaagatgagatatttgcgacaggatactcgagatacaccaatagcattggcgagttgttctgtggagaattcgctggtctggttagccacaatccattcgcacacggtacgtaaagtctgactggtcaatcccttaggcagttttttccgctcaccggtattacgactgtctcggcgcaatagtttatctatatctgattgggcatagttatcgcgctgttccagcaggcgatgctgacgtcgataaaccgacagcgcctcttcaaatcgggcaaactggaaaggttttatcaggtaatcgaccacgccgtactgcagggctttctttatggtattgacgtcgctcgcagaggaaataacgataacgtcggtgtgctcgctaaattcccgcagcgtgggtagcaagtctaacccgttatcttgccgcatgaaaacgtctaaaagtaccaaatgaatcggcgtttcggattgcattagcctttctcgcgccgcctgtagcgatgacactaccccgcaacaggtaaatccattgacctgacttaaatagcatttattcagctcggccaccatggcgtcgtcgtccactatcaacacattaatcatgatttaccgcactgattttataagggattttaataaagaactgagtgtgacttcctgcctcagactcgaattcaagtgtaccacccacggcttctaggcttcgttgtaccagtgttaatccaataccgcgtccatttccttttgtcgaaaagccttccttcaggatctgggattggcaatcaaccgtaatgcctggcccattatcactcacttcacaatgcaagatatcgtcgaccagatgaaagctaacgttgatttctttctgcggcatatccgacatggcatctaacgcattttcaatcaaattgccaagaacagttattagtgtggtggtggtttgttcatctgcagtatccggcagacggctatcttcactgaccagcaatgtaatatccatgtcccgcgcccgattaattttcgccaacaggaagcctgcgatcaccggggattttattttaaatagcaaagagccgatctcttcctgataattatcggccgttttaagaatatagtcttctaactgcggatagtgtttcatatgcagcagaccaagaataacatgaagtttattcataaattcatgggtttgtgttcttaatgcgtcggcataattgaccatgccggttaaacgttgcatcaaatggctaatttcagttttatcgcggaaagttgcaatagcgccaatgatatcgccattcaccaccactgggacggtattggccagcagcatactgccgttgaaatctatttcctcatcgcggcgagcaatacccgtggtcagcacctgttgtagattgaggcggtctggccaatatttgctggcattatccaacagaaggttttccaacggaccattttgcttaaacaagcgtttggcttcgtgattgaccagagtgatgcggcaatcagtatcaacggcgataactccttctttgatcgattgcagcatggcatcacgctgttcaaacaaattggatatttcgtagggctcaaaaccaaacataattctttttaaggctttgactaaaaaccaggtgccgaggctgccaacaaatattccgaatagaatcgtccagggaacgctccaaagattttcatgaataactgattggatgttgagcaacgaaatgccgacggcgactacgccaatttgctgatgatttgcatcataaacaggggtgaaaatacgtagggctggcactaaggttccacgattaatcgcgctgctttcttccccaagcaatgcgggttgcagatcgtccccaataaaatgtcgtccgatcattttagtattagggtgcgagtaacgaatgccgtccatatcggtgacgacgataaataatagttcgttgctcttactgacgctttcagcaaagggttgaattttatccttatcctcagtgtgacttaatccattgatcacaataggggataatgcgagagtacgagcaaccgcaaaggatttttctttgagattattctgcgcaatatggctgatttggataaaaaacagcgtgtgtactgccaatagaaccgaaattataaccacagaaaccataagtgttactgaggtgccaagccgcagcggttttttttgcctgcgcgccggttttacaacgtccatgccatgctccagagatatccatcagaaaaacccttctagagttgatagatattttatgaattagttcaaactattagattaataccaacgagaaaaataagctgtgatgcaacacgagataaagcggggatgagaaaaaaggtgaaggatataaaccgcgatctgaccataactagccatcttccgtgacgctctgaatccactgctgtaataaggttaatgatttttcaagattatatcacatgaaatatgtgatgatgaattaatttacttacttaaccgaattattgcttagatatcgtcatttgcattataaaaacagcggcttgtcagttttgggctaaaaagtcaggggcgtgaatacactcagcgtttaattattattacttactcatattcgccagacttaaatttattatatttcattagttttatagtgataaaaatttattaaataaattaggtatgataattattatatagaagtggtatttagctatcatgcgccatgagagctttttgaacaacagagactagatggatgtgtatatggttttccccattaattgtagtgacgctggattactcttaagcaggttttctgagtgtaaaagagtgactgaaaagagtagcaaccaagcagaacccacggcccagcggatagttgttggcgttttgttttatcctcctgttcctgtttacccctgaccgttggcaaaaaagtaccgccgtctgaaacatttcatggaatgactctggctgagaaaccattcatttaaacaagatttagaagaatccaattcataaaaataaattgggtctttacgcttcaccatgatgaaaatctataaggaacccttttctacttaatatctgcaacgtgcccgtaagataaatcacatgaatttttggagcaataatgacttttatgaaaggacgcttagggaaaataaatttaattttacttattggattatctatttggttttatcccacacccgcaacggtagaccctaaagcctgggggttaatggctatatttaccagcaccgtcattggattgattatttctccttatcctttaggtgcgatggcgatattcagtttgacactatcggttgcgaccgggctagttggaattaaagatattctagccggttttggtgagccgattatctggatgattgcctgtgctttctttatttcacgagggtttattaaaaccggttttggcagacgagtgggctatttctttatcagtaaatttggtcacagttcactgggcctggcttacggactggtgctgaccgatctgatattcgctccagccatgccgtcaacgtcggcaagaagtggcggcattgtcacgccgatatttcgctcaatttctgaagcttacggttcgacgccagaaaatggcaccgaacggcaaatcggcgcttttctcattcaatgtgtcttccaatgcaatgcgataacctgcgcgatgtttttgacgtcgatggctgggaatccgatgatcgccaaattagccagcgaaatgggagtcacaatcacatggggaggatgggcgttggccgccagcgtaccagggctaatttctttagtgattatcccattgttactttaccgtttttacccgccggtattaaaaaagacgccggaaatgagagccattgcctgtgagaaattaaaagaaatgggggcgatgagccgccatgaatggattgttttgtgcgtgtttatttgtctggttgctttgtgggttagcggcgctacgctgaatatcgatgccactttaactgcgtttattggattaaccgcgttactgttgaccggaactttaacctgggatgatgtcgtggcagaaaaagaagcctggcatgccatgatctggttctcggtattattaaccttggccagccaactgaataagttagggttgattaaatggtttggtggaatcgcggctacctgggtggatggcatgaattgggttcccatgctgggagtcttattgctggtttactattatatccactattttatggcgagtgcgattgctcatatcagcgcgatgtacgccgtgtttgtttctattgctatctctgcgggcgctccgccaatgttgagcgtactggtctttggtatttttagtaatttatatatggctacaacgcattattccggcgggcctgcgccgatcctctttggctgtaattatgtgccattgagtacctggtggaagattggattcctgctcagtctggccattattcctatttggttgattattggcagtttatggtggaaaaccatcggctactggtaatccgattatggtggaaaaccatcggctactggtaatccgataggttttatacgttcagggccgatattgatcaataaaggccctcaaccagcgaaaaatatggcgcacagggtatcggctactcggttatgtggcccggagcacgatcgccagtcttcaggcaattctggtatccttcattactgaaacggttggcatcaaggttaagggagtattcgcaggggaggcaatgagatgttggcgcggaaggggattccgtcgccatagccggtggagagaaacgggccaaaactgcggccaacatttgatagagtcttttcattcttgttaccctcatgatgatctcggtgaatgataggttagttacgtcctgtaatgataaccattatcaataataatcatagagcatcatttatccaccttcaaaccctaataaggaatcgtaatggaatggaatattgcgcgttcctgatgatgtttcctttctcagttgggacataaaacttaccagagcgccaccgacgtgccgcgtcatcttctggtaaacgttcttttctacggattaaccattcggtttttcacactgtattagcgattaattgacgttatttcagaatgtatccagagatttcatcttcagtcttggagaaaaaaatacccctgaaataaatgtatataaaaggtattccattccaaatgagaattgtattgataatcattactgttatgtataataatgcattcaacatctattaggttggaggtagaaggtgtcaaatacagagaatttaattacaccttcacctgtaggggtaatagcagatatcgcgcagctctttgagcaaacctttgctcatttttctgtaacgtttaaagtgaattccgataatatcccttccaaaagtatgagtttcaatcattggtcaaatgaagataattttccgtcactgatggaaatttatcaaaatgagtattacggcatcaataatataaagccgaatcagaaggcactttattcactatggacacaatggtatttcggtttggttattcctccaatgatgttgttattaatggaatatccgcaggaaattgactccgactgtcgaaactttaaagtggaatttcatgatagtggcaggccagatattatttactatcagctaaaatggaaaggtcagagcgcggaaaatttactagaacgctattatgcactgattaataaccatgttattccaatagctaataaaattgagtcctatcagggtataaacgggagattactgtggaataacatcggatacctgatgtattggtatctgggtgagtttaaaaaacgcatgaaagaagatgtttatcagtctgttattcaaggtctttttatgactatgaccttgccagacggccgcgaaaatccgctttatcgcacggttatactacgtaatgacaccctgcagcgccgtagctgttgccagcgtaataagctaccgggcgtgggtaattgtcatgattgtccgctcgaaataacgctataaaggtattatttattctgaaataacctcttgcttctggccggtggtttttgtagtgactatttaactctctcttagagttgtcgactatatacccagttatcattgcttataataaaaatatcatggaacagtaatctgagcgcatctatatatattataaggatatatcatgtacggagtagcccatactgaaaccccttttttatcggaaagtggtgatataagtgaggtgctttatttggggagctttctaaataaacaaagtgccgataattatcaggaaggagttaataatgtcactgaaagaattaagggcatattaaacgttgttgataaaccctttagcgggatattaccgaatgaattgtcaccgcttatttctggaataaacctggataatccgctgccctcactcgattctgcgctggatgaattacaacagctgtatattaaagatgctgtttattttcatcatcctaaatatgtagcgcatttgaattgccctgtggtgctgccggcggtgtttggggaaagtattattggtgcgattaactcctctttagatacctgggatcagagcgcaggtggtacgctgattgaacagaaagtgctggattggacccgagataaaatagggttaggtgaagagggggatgggattttcaccagcggcggaactcaatcgaacttaatggctatgttactggctcgcgatcatttttgccatcagcgagacccggcccataaaaatcaattgcagggactcccagccgattttcacaaattccgcattttcacatcggcggttagccacttcagcacgcaaaaagcggccgcattattaggcttgggttacaacgcagtggttcctattccatacgacagtgaatttagaatggatactcacgccttggagttaagtatcgaacgctgtctggcacagggaaatatccctttagcggtggtggcgaccacgggaaccactgattttggcagcatcgatcctctacgtcctattgcagcgttagctcagcactatggtctttggctgcatgttgacgcggcctacggttgcggcttactggtttcttcccagcatcggcaactgctcgccggtattgagatggcgaactcggtgaccgtggattaccataaatcctttttccagccggtgagctgtagcgccttctttgttaaggataaacagcatttttcctatttgacctatcacgccgagtatctcaatccgttaagcgcattacaggaaggaacacccaacctggtgaataaaagtatccagaccacgcggcgatttgatgccctaaagatgtggctgacgctgcgtattatgggtgcaaagcaattggggctggcttttgagcgattaatggagaccgcgcaggtcgcttatcaattaatgcagcctaacccgtattttgaactgttgcatcgacccacgttgagcacgctggtattccgttttataccgctggattcccgcagtgatgcagaaatcgatctcaccaatgcatatattcgtaaggcgttattccgagagggaaattcggtcattgccgggaccaaagtcaatggccgtcagtatttaaaatttacctttctgaatccgactacggggattcagcatttaaatgaaattatcgatgccattatgacccacgggcagaactatgcggatcagcatcacgtcgccgcgctaaacaaggaatgattatgtccatgcgaccttatgattttattgccatcggcattggtccttttaatcttggattggcatgtttaacccaaccgctgaacgatgttcatagtttattcatcgatcaaaatccgggttttgactggcatccagggatgatgctggaaagtgcaactctacaaacgccctttatgtcggatctggtgacgttagcgtcgccaacgcacccgttgagctttttaaattacatcaaacagcagggcagaatttattccttctatattcgggaaaatttctttctgatgcgtaaggaatataaccaatattgccaatgggctgccgcgcaattgcctaacctgcgtttcaatactcgggttgaaactctggagtatgatgaggaaaccgcactgtataagctgcgttgtctggatttgcgcaccggcgattattacgaatgtcagtgtaaaaaattggtattaggcactgggccatcgccgtgtattccagaatgctgccaaccttttatcgcgaaaatggtgacttctggcgattatctggataacaaagcggccttgcagaagaaggcctctattaccttgttaggcagcggacagagtgcggcggagattttttacgatctactcagtgatatagatcgctttggttatcaactcaactggctcacacgttccccccgtttcttcccactggaatacaccaagctaacgttggaaatgacatcaccggaatacgtcgattacttttataacctcccggcagaaaagcgcgatgagctgaatctgactcacaaacaattgtacaaaggcattaatagctcgttgatcaatgacattttcgatctgctgtacaccaagcgtttggacggtgtcctaaatgtgaatttgtataccaatagcgaattacagctggtggaggaaaatagtaatggcaaaggactgagtctgtctttattacagcatgaacagaatcagccgttcactttggcgtccgaaagcgtggtattggcgactgggtatcaatatcagccgccgtcgtttattgaaggtattcgccagttaatccgttgggataataaaggccgatacgacgttcagcgcaattacagtattgatcgccgcaacagtatttttgtgcaaaacgtcgagctgcatacccatggttttgttacgccggatttgggaatggcctgctaccgtaattcctgtttaatccgcgaaataaccggagttgaacattatcctattgaagaaagcattgctttccagcgtttcagcgtgccagaacagggagtcacacaatgacgcaggcgacggcgaaaatgaacccactgacgccagtggaaagcggcgatttcacactgcgacctttagatttgatgcaggatattggctggctgagtcattgggtcagtcgcgaatatgcccagtactggggaatgcaaaatcatagcgagtcacaggtattggcgttttatcaggaattactcgaccggaagccgggcagcgtattggttgggatgaaacaccagcagcctgcctttttgctggaacgttatctcgccaaagaagatgtcattgctgaatattatccggcgctgccggacgatgtcggcatgcatattttagtcgctccgccggtaaataaagtggcaggtttcacttggcgtgtatttcaaagcattatggcgtttattttcagcgatccactggtggcgcgtattgtagtggagccggatgtacgaaatgagaaaattcatcgcctgaataaactcgccggttttgtttatcagcaacggttagaaatgcctcacaagacggcatggctggctttttgcaccagagaacaacatcaacttgcgcttcagtctgcgcgtcaactggagcgtcaatgatgatagccaactccgtcgttgccattcagccccacgggttagccgtggcgcatttgcagccgtcactatggcaaaaagtgaatcgtttgcacttgtgtaaagctatttccgagttttcccacgagcgcatattcgctcctgagatattaatgagtcgacaggacggtgagggttaccactcttaccaactggctacgtcagataaccggattcgttacgttttccgcgcccgccggttggcactggatcactggctactggatccttcgtctttgcagaaaaccgttgatgggcagctggccgatttggattcgctgttatttatcattgaatttaaacaggaacttggcattagcgatgcggtgttaccgacttatcttgaggagattaccagtaccttatacagcagtgcgtataaacacagtcgggtgggtattagcgcgtctgaactggtcaacgccaacttccagttattagaacaggaaatgatggaaggtcatccttcctttgtcgccaataatggacgcattggttttaatgggcaggatttccagcagttcagcccggaggccgcttcggacattcatttggtctggctggccgcgcataaaagcaaagcgcattttgccagcatcgaacagctagattatcggcaactgatgctgcaagagttgggcgaggaagcgctggcggaatttgaacaacggctgatcgccaaagatctcaatccgcaggattatctgctgatgccggtgcatccatggcagtggctgagcaaggtgtcttcggtatttgctgcggatattgctaaccaaatgctggtgttcttagggacggggaaagatgtctatcaggctcagcaatcgattcggacttttttcaatcggagcgaaccgttacgatattacgtaaaaatggcgctatctatcctgaatatgggctttatgcgcggattgtcgccttattatatggctaccacgccgggcattaatgaatggctgtttgagctggtggaaaatgatgagacgctgcgctgctacggttttaaaattttacgtgaagtcgccagcgtgggtttccgcaacagttattacgaacaggcggtgaccggggatacgccgtacaaaaaaatggccgcagccttatggcgagaaaacccgctgcaattgattcagtcgggtcagcaggtgatgaccatggcggcattgctgcatctggatcagcagggcaaggcgtttttgcctgagctcattactgcctccggattgtccacagagcaatggatagctcgttatttacaatgttatttatcaccgctattgcactgtttgtatgcctacgatctgatgtttatgccccatggggaaaatatcattctcgtgctggagaacgccgtccctcagcatatctttatgaaagatctggcagaggaaattctggtgatgaatcccgtcgcagatttaccggaaaaggcgcagcgggtcaaagtggatatgccggaggatatgaaaactctgaccattctttccgatgtatttgacggcgtatttcgctatctggcggcgatcctcgatcagcaggggaattattcagaagggcgtttttgggctgcggtggcgaactgcatttgggaatatcaacggcaacatcctgaactggccgggcaatttgcacgttatgaactgtttacacccaaaattaagcgttgttgtctcaatcggttacagttggccaataatcgccaaatgctggatttagccgatccggctcagagtctgaaatttgccgacgatttgatcaacccattagttgcttttggaatacctgccgtctagttataagttacatcaatactactgtgccccggaggcaattttccggggcgttaagtcttggtttagggtcggactagcgcgggtgatagcgaggaataactaagggtttacctgattcaggatcggtaataattcggcaacgtaggccgaatactgcctcaatactttcttcagtcactatggtttctggccatccttcggcaaaaatcttcccttcttttagcatgataagatgagtggcatagcgtagcgcctgattaatgtcgtgcaagaccagcaccagcgttttgccctgctgatgcaattgctgacataaatccagcatttcaatctgatgggcgatatccagataggtagtcggctcatccagtaacacgattggagtatgctgtgccaaagtcatggcaaaccacgcccgctggcgttgcccaccggataattcactgaccatctgttgcgctaatggctccaggttgaccgcctttatagctgcgcgaacgatattatcgtctgcggcagaccattgacgaaaaaaggattggtgggcatagcgaccccgcgaaaccaaatcgaagaccgtcagggcttcggagacgccagcgccttgggaaagtagcgatagctggcgggctaaggctttagctctgaaatgctgaatattttgccgatccagtttgatacagccactttgtggcgataaaccgcgacttaacgcgcgtaatagcgtcgattttccacaaccatttggcccaataattacgctaaaagctccgtttttaatgcctacgctgagtttatcgacgacagtccgcgggccgtagcttaaagacaataattgagtcgttaagcgtggctcatcggtgtggtactgcgttgcggccaatgactccgaggataatagcgtagaagggcagtctaactcgcgtggggacgtcattttattctcctgacttcagcgtacagcaaatacatcaaatagataccgccaacggctgcggtgattacgccgaccggaagccgggaaggcgtgggcagcagcagagtgataatatctgacgccagcagcagtagtgcgcccatcaacgcggtgcacagcagggcaattcctttggagcggagcagatggcgggtaatttgcggcgcagataaagcgataaatgccaccgggccaaccaccaataccgctgcggtagccaaagttattgccagtaacagactcaacaaatgtgtcagaccaatattgacgcccaatgactgggcaactccgctccccagacttagaaagttgagttgacgactgagatacaccaaccccggtgtcactacgcttaacgttaggccgataaggcatacgtcgcgccagtttttctccgccaggctgccgctgagcaatgcggccatctggtttgcctgttccagccgtacttgcgaaatggcgaagttgacgaatgccatgcaaagcgcaccgacggcaatacctgaaataacaatttttcccgaatgagataggttgttaatgctgcctgcatagaccaatgcgacggcgcaacaggcaccgaggaaggcacctacggggacaggaatgacgcccggccagagcaacagggtggccactacgcccgcggaggcaccggcggtaatgccaataatatccgggctgcctaatgcgttacgggtagtggtctggaaaatggcgccagaaattgccaatgcggctccggctcctaatgcgactaaagcgcggggaagccgcaattgcagcaaaataaaatgttcaaattgactgccttgcccggaaaggacattgagcgttttttcccattcaaacccgttagggctcaataccatggcgataagcaggcctaacaatagagtcggtaacatcaatagtagataacgctgtgtagtgggaaccggagccaaaaacacccaagatcccagcgttagcgttttacaggaattagtgggaggcatcggcaaatccttttttacgattggcgaccgcataaagcaatgggccacccacggcggcggtaatcacgccgaccatcacttcgcctggagcaataatcactctggcgatgatatcggcagttaacagtagaattggcccgaccaacaggctgtagggcaacagccaacggaaatcgctgccaatcatggcacgaaccaaatgaggtgcggccagaccgataaaggcgattggacctgccagtgccgttgccgctgcggccagcatggtcgcgccaattaaggccagtagccggatttggaccgtattggcacccagcgcggtggcgatattttcaccgaaaaccatgatgttaagggacggcgcaatagcgagaacgagggctaatccgccgataaaatagggcaccaccggcaacatcgccatcatcgacatacccgacagcgagccaagcacccagaagcgatagttctctaacacggcgggatggagtagtaccacaccttgcacataggcgaacaggcaggcattgatcgccgcaccaatcagtaccagacgggttggattactattaggtttgccgccgcttaacagataaaacagcagggttgccagcgcggcaccgatcaatgcaggccaaaagcgagaaatagcagccagcgcaggaaaaaaggcaaagctgacgatgatagccgatgcacccgcgttgacgcccaataaaccgggatcgccgagtggattacgtagcagtccttgcgtcacggctccggacaacgccagcgccgcgccggccatcagacctattaaggttcgaggcaatcgggcctctatgaccaaatcgtgatagttacggtcatcggcgctgaaatagtgccagaccgcgctgagaggtaagggtttggctcctaacgtcaggctggcaacaatacagagtagggtgagcagcaagagtcccacccagccccaaacgcggcatgctcgctgccgccgatgaatctgctgagtcatggcggagtctccgaaacggtagccaaatggcgcgctttctctgcgaccagcggcataaagcgttgcaatccccaatcgacgcttaaaggcgtgccgtaggacattgccatcacgatggcctgatcggtcattgggatgtagccaccgtggcgcactgccgcaatggcattaaataatggctgctgttctactcgctggcgctcctgctcgctgttgtaccaggtcactagaatatccacatcattcagtcggtcagcattttccagcccaagatttgcggcgaaactgcctcgggacgcggtcaggtttttaatcgagggagccaattgcaagccggttgcagagagtgtatctacgcgaggatcgcccgcgacatatatcgatagattggcattattagccgccgctttaatgtaagcgaagcgcagtctcgctatgcccggtaccgttttgcccgcgtcggccagagtgctttctaattgcagtagtaaatcttgagcctgagcttctttacccaaagtatggccgatcaattcaatctgctggcgggtagacgtcagccagggcaagccgggataggcgaccaccggcgcgaagcgcgacagctgatcgtacaggctttggctaatacccgactgagtggcaataatcacatcgggcttcaggttgattagctgctcgatatccagttcgggatacatgtgcagaattgtcggtagagtttgtccttgctgttccagcgcctgacgaaaccagggcagatagccttgctcgtcgccgccccagcgatgggattcaatgccaatcggaacctgccccagcgccagcacaatatcctccgatccggctcccaaagtcacaatgcgtagcggcggacgctcaatgaccgcagtaccgagagcagtcactacctgccgtgggaagcctttttcacgagccgctgttacgccgtctggcgcagaagcgttatcgcagccggaaagcaaaaaaaccagcgccaacaggccggttaatacagtcactattgtccccgtgcgatgacgggcgaatccataggggcttagggaattatttatcaataacatttgggtcgagagtttttccttagtgttatcacaagcagccacggagccgaaaaacgcgctccgtggtgttggcggtattaacaataatcagaaggtgtaacgcacagtggcatccacattacgcggcttgcccactaggtattggctgtactgaccaatttgcgagtaataatgctgattgaataggttatccagattcaccgtaagcgacagctgcggagtgaactgatagcggctcatcaggctgtaaaccgcaaaactatcctgacccacgcgctgcacgccggtcgggctggttacatcactgtaggtcttgccttgccagttgacaccgccgccgagagtcaggtctttcatcgaccctggcagggtataggtggtgaaaactttcaggactttttgcggcgtgatcggagtgaaagtttgcccgtttggcacttgcacatgatattgggtataaccggcgaacaggttccagttttcagtgactttcccgctgatttccgcttcaaaaccacgggttttagtcccgtctacggcatagtaagggcggctgttatctggcagacgcggcgcggtggtatccgccactggcatgttgtcctgacgaatttcaaacaccgctaacgaataatcaatgctgttgtcgaaggcgacgcctttcattcccacttcgtagttttgcccactgatcgggtccaacagttggttatcacgattgcggcgactttccggattgaagatttcggtgtagctggtataaaccgacaaatcgctgttgatgtcgtaaatcaggccgctgtagggcacgaactgatttttatatttggcattttgcggcgtgccgaagttatcgcctcgggtttcccatgtggttaaacggccaccgagaatcaacgttagcggatcggccagagaaagctgagtcaccgcatattgcgcggtttgatcgttacgccctttagaaccgtaggcgcgagtagtgctccagatcggtttaggatactgccagcccggctgagtaaaatcccccagttcggggcaagtactgcgggtgctgcaattggcgggattgtaatagtcgttatcaaaattctggcgttggtggttccagccaaagccaagctgatgttgacgcccaaacagactgtaatgaccgttaacctgaatatcatagttttgctgacggcgagttccgtcaataagcgacatactccctgggcgcatgccgatattggtcgtacgatccggataaccatctgcccacatcacgttttgcagcagtttgtcattatcaaaagtaaaggtacccttgatgttccagccgttgtcgaactggtgttgcaggctgctaaacaacgactgggttcgggtttcggaagaagtccagtcaggcgcggtgctggccgaacgaccgtaatgagttcggccactgtcgctgtaaaacagcggcaacccgccaaacatgcccccttgggtcatattgcgttgagtatcggcgccgatggtcagcagggtgtctggcgtcagatccacttccagaatgccgtaaaatggattgctgctttgtttgtatcggtcaacgaaagaatgggtatcctgatacgccgtgacaaaacgcccgcggacgctgccatcgctattcagcggaccagaaagatccagcgtagtacgccatttatcccatgagccaacgccggcagaaacgctgccgcgaaaatcctgagtcggacgtttacgtaccagattaatcacagccgatgggtttcccggcccggtcattaaacccgccgcaccacgtaccacttcaatccgatcgaacatatcggtatccagcgtgttatcgccgtaattaaagcgggtatcgtaaaaagtggctacgccgtcgcgcataatattattcacgctcatgccgcgtgaagtaaaaccgaagcgatcgctatcgaactgacgaacgttcaggccggtaatattattgaccgcgctttctacgctggtcaggttttgatcgcgcatacgctgtttcgtcagaatactgaccgactgtggcgtttcgcgagcagaaatattcagaccggtggccgtagacattgaagaggtattataactgccgctgtcttccgttacacctgggtggtttagcggcgaggcaatcacggtcatggtggtttcttcagcgctgtttttcggtgatgacttcgcgctgtcattatgattatcgctggcggcataggcgctccccaatagcgataaattagcggcaagagcccatgccacgggtttaactctgtgtgaaggttgcaggcgaatcgggttcttgccgtcacttcttttcattattcttttcaccaaatatcaggttgtgccactggggtgggcagcgacccacgccgctgccgtcattaattaacctgccgttttaaaggcatgaatcgggtttgctaaggtgccagcaaatttgagattcttctcccgatcgtcgagatcgatcatttgctggttattggccatttgcaggcgattcagacaggtgcgaacaaaatcggctttaaacaggtcgaattggttatatttatcggccagtgccggatgctgagcctgataggcataaatgcagtccgcgactaatttccagaattggcgttcgggcagtcccagatctttttgtagaattggcgtgagataacggaagaaacagtcaaaaatatccaggaaaatataattgatcttcatatcgtcttcgatagtgacatgcagatctttaatctcctcgggcagtgttatatcgccgttaagaatggcaatttcttctccgatatctttcattaacacatgtaccggaacgttattctccagaaccaacatcaggttttccccgtgaggcataaagaccagatcgtaggtgaagaaggcgtgcaataacggagaaagataggcatccagataatgtgcaatccatttatctgcgtctaaaccagaagaatgaactaatgcggccacgaccgaatgaccggtattatcccggtgcaagagagaggccatggtcattaaacgctgatggctggcgagtaaggggattgggctttctcgccatagcgctgaaagcattttcttatgcggattgtctttaatcagcgcggtttcgaaataatcattgaaatagcccattgctgcgcgttcccgcaggagggtaaattttttctgttgaaagaatggatcttgggaaaccaacgttgccagccattcattcactagcggcgtggtggccatactgtgcggggaaagcccgcgcataaagcccatattcagaatcgacagcgccgttttaacgtaattcttttgcggattagcgatattaaaaaatgtgcgaattgactgttgggctaggtagctatcctgcccttggcccagataaacaatgtcattgcgtgctatatcggcggcaaagctagtggcaattctttcgtaccattgccacggatgtaatggcataaagaaatagtcgttagcgttcaggccacgggaggttaactgacggaggaaatcttctgtctggtcattccccagttcttcctgcattaactgctgataactgagaccagttaaactggcaaaaacggttttattttggtgtaccgcaatccagataagtttgatcgaatgagcactttccggcgcaaagtgagcataatctgcaatatcaaacccaatgcgaccattattagcaataaaaaccggatgcccttcgctcatcgctgtttctacactttggtagtctgcctgagttaactgtgtcgaactcagattattatggtgatatttaaatgcgtgaccataaagagtgctggagatctcatctaaatagactggcagcattttttcggaaatacaaagcaggctatttaattcaatgataagttgtaacgcatccagtggctgcggtttaccctccacggttttggttaatgtatcggtttcaatatccagatgatctagttggtaagggtaggcactgaagcgatattctattttgttgtgattggaactaacgctgtcgggacaaaaactatagcgacaaaggccattcgcctgcgtttccagacgggttggtgcgattaatttctcatggctaagttcacgcagtattttcccaactaaatgggtattcgctcgagaccagttctcgccattaagatgttggatatagttatcattgaatttccgcgttgaagccatctctatagtgtccctattgaagagtagaatttcagggaataataagcccagacatacctgagggattgatatccatgctcaaggtgttcctatttgtcatttggctaacgttaagagaaaacgattattattccgttcaaagcgggatatatatagcattataaattttttgatgcaaataattatcatttcgatattgataattgcatttgtcggtttttaactgactatatcattgaatattatgtgttttattttatcaggttgttacgtatcaaactgacttaagaactgttttagcatgtttccagtaaaatctgaccagccgttttccagatatatatccagttaaaatgtcatgatattagttttgcttttccctctaaaataataaggttaatcgacggggaaggaacctgaaaatcagaatttaatgaattcaagatggatttattattggtttaattttggttttgttatccgcttttattacggcgttctttattcatatgcctatttttcatttattataactttattgcatgataagtggttttgaggcgtaattataattggttaattttaatcctaggtcgacaatgaaatggatacatgtcaccaatattaattcactatgccaatgattatctatgaaatgattatatatacatctatttttataaaaataattcaataattattacaatataactccatgttttaattaaatttttaaattttttccataaagggataaaaataaattccaatattcttgcgttttataataaccgtctataattaattttgtataactacttaggcagttatcaatcatctttttatatttttttagtcatactgctgcatgatcgcggcagctggaagcctgtgtctttaatttattattagattaattcattggctatattcggttaaattgcacttaagccaaattacttggaactttatctatgaaagcaagtagtaataaaactgtcgatcagtttgatgctgctgtagcgcgtaatggctataatgcggtaaatgagttattacagtatcacgcgcgtggtgatgacctgataagaaatggcaaaccgtcttactctactgaagacgcggggttacagattacccgtaccgggcaaacctggaatggtaaaaatgtttttgatcagccagtaaagctgacctattcatttttaaacagtgttagcaaaattccgagtggcgataagggttttgtcaaattcaatcctgcgcaaatcgaaacggctaagttgtcattacagtcgtgggcggatgccgccaatattactttcacagaaatcgcgtccagccagaaagccaatattacttttggtaattatacgctttcccacgacggttctccggccgattcccaggcttatgcgtatttaccgggtagcgggagtccgtccggttcgacctggtataactacaatgtcgataatattcgtagcccaaataccatggaatacggccgccagactataactcatgagattggacatgcactggggcttagccatccgggtaattataatgcgggtcaaggttatccgtcttataaggatgtaacctacgcggaagacactcgtcagttcagtattatgagttactggggtgagaaaaataccggtggcgataacaaaggccattacgccgccgcacctcttttagatgatatttccgcggtccaacatttgtacggtgcaaatatgacgacccgcgccggcgatactatttacggtttcaattcaaacaccgatcgtgattattacaccgcgaccgatagcagcaaggcgttgatattctccgtatgggatgccgatggcaacgatactttcgacttctccggctatagcaataatcagcgtattaatctgaacgaaaaatctttctctgacgtgggcgggctgaaaggcaacgtatctattgccgcaggcgtaaccatcgaaaatgccattggcggttccggtaatgatgtcatcgtgggtaatgatgcgcgcaataccttaataggtggcgatggcgacgatgtgttattcggcggcggcggggcggacgtgctgtggggtggcgcgggtaaagatatttttgtctttgctcaagtaagcgactccacaccgaaagctaccgactggatcatggatttcgaaagaggtatcgataagatcgatctttcggcctttaatctgggtaaaagcggtggcctgcattttgtcgataacttcagcggtaaagcaggtgaagccatgctgacttatgacgcaggaagcaacgtaagcgatttagcattaaatatcgctggcgaccggtcattcgcagatttcctagtgaagattgttgggcaaccggctcaggcgacagattttattgtttgatagcttagattcttgaaataaaaacaacgtctaatgatttttattagacgttgttaatgacttaaatcagaaactccggaataagctaataggatttttctgggaaaataacgcgtaaatttaatggttgtaattaggatttatcttttttaaattcatgctgattattattacttgtttttaataacgtaaaacatataatcaaaacgcattttgatgattaaacaaattatctttatgtattaattagtctgaaaataattgtatatatgaagtatgtttttatgtaatgccactacaaaggagatgacatggatttgcattttttacacgggtaaatcttacccgttaatgagtgtagatagtcgccgtggtggtgagtttatttaattacaaggaacttaacgttgaaaacaatcaagaagacatctgacgctcaactcgcctcaaataatcatatggaaggttatagtgatgtaatcaatctattcttagattctgttcgtggcgatggcgttaccactactagcggtaaagcgagttatgctttggataaagccgtattgcagttaaatcgcggtggattaagttggaatggtaaaatgaatttagggcaggatgccgatcttaaatattcatttttagaccacaattccaaaattcctactgggattaacggattcattaaatttaatccggagcaggtaattcaaactaaacttgcactccaatcctggtctgatgttgctaatgtccatttcactgaagtcggtccaacggagaaagccaatattacattgggcaactattcgttaacctctactggccagttagcgggcggtcaggcatttaccagcaccagttattacagtgatggcaaaattgcaaacgcgggtacctggtataattacaacgtggataatattcgcgagccaggctcaatggaatatggtcgcttaacattggcacatgaattaggccatgctctggggctgagccatccagcggattataacgcgggtcaaggcaatacctttaaagctgatgcggtttacggcgaagatactcgtcagttcagtattatgagttattgggatgaaactcaatctggagcggatcatcaagggcactacggattaacgccattggtggacgatattgcagcaattcaacgtttgtacggggctaatatgagcacgcgtactgaagataatacttacggttttaactccaatactcatcgtgactctttcactttggcggatagcagcgatcagaaagtgttctccgtttgggatgcgggtggcaacgacacctttgatttctcaggctatagcgttgatcaacgcattaatctggaagcgacgtcattctctgacgtaggcggcctgaaagctaacgtttccattgcggcgggtgtcactatcgagaatgcgattggcggttccggtaatgacgtcatcattggtaatgaagccaataatgagttgcgcggcggagcgggtaatgacgtgctgtttggcggcgaaggtgcagataaaatgtggggcggcagcggcagcgatatctttgtttacggtcgcgccacggattcgacactggccaaccctgactggattatggattttgaaggcggtatcgataaaatcgatctgtcgggattccatgttgggacaggtggaattcattttgtcgattacttctccggttctgcgggtgaagcattattaacttacaatcctgacactaatatcagcgatttggctgtgaatatcggtggtgcagaagccattcctgatttcctggtgaaaattgtgggtcagccaatgcaggcgactgactttatcgtctgatagaaaaagtgaaatatagccaatgtctgattgattaaatcaggcgttggctatgaataaaaaattaatggcaggttttgtctgtgttttttatgagaataagataaatctataagttattgactaataatttttaggaatatttttatttattataaagaaaatattttccttaataagatttatgattaaaagatttatcacgtagggtggttttacggcagcggtatagtgattttaattattcattagtggatacccagatcgctaaagcattttgtgttaaaggtgcttgcagccgtacagttcgaaaaatctgtgaacggtgatgcttttgaattgagggtcatgacaaaagcattggttttatctaaccaaactatccggaatatacgtgatgaagcaaagtaaaaataaaataacagagcagggacaacataatgaatatcagttgggaagtttatacgcgcaggggctaatggcgggtgcaactgatcgaataggcacatcgttaaagcagaataaagtgtcgtttacttcggaagaagccgccgatgccattacacgaacaggtcacagttggaatggcatgaaacaaattgatcaatcggcagaggtcaattatttatttttgaaccctaggtatggcgctaaaacgcctgcgggtgactctgggttgacgaaatttaactcagcgcaggtcaccgcggcaaaacaggcaatgcaaagttgggctgacgtagccaatgtgacatttaatgaaaccagcgcggttcatgatgcgaatattcgttttggtaattatgaaatttactccgggcaagactctaaccctagctttaaaaccggatatgcatatttcccttgggggccatcgagtcaggtaggagtatggattaataacaatcatcaagggaatcaacgtccagatttatatcaatcaggtcatcagaccttaagccatgaaataggtcatgcgcttgggttaagccatccagggcgctatgactctctaaaaggtacgccaaattatggtaatgcgggttatgcggaagacagtaggcagtacagcataatgagctactggagtgagtggaatactggcgctgattttaaaggtttctatccagttggccctcaaatagatgatatcgcggcagctcagcgtctttatggcgcaaatatgaacacacgaactgaagatactgtctatggtttcaactcaaatacgaatcgagactctctgagcttaaaccatagcagtgataagaaggtgttcgcagtttgggacgcgggtggtaatgatgcgtttgatttctctggctattcaaacaatcaacggattaacttgaacgaacagtcattttccgatgtcggcggtttggaaaaaaatgtgtccattgcggcgggcgcggtgatcgaaaacgcgattggtggttcagggaatgacattttgatgggtaatcatgtcagtaacatcttaaaaggcaacgccggcaacgatgttatttatggtgcaggtgggggagatcatctgttcggcggcgaaggtcgcgataccttcttttatggcaatatccaggattcaacatcagagaacccggatactatttatgatttcgtcagcggcatagataaaattgacctgagaggtttgaatattgctgaaaatagtgcgcggctggtgaatgagttcagcggtaaagcaggagaagcgatactgagttttgatgagacaaccggaatgaacgaatttgcgttgaatcattcgggcggcggactttcatctgattttaccttgaaaattattggccaaccgatgaaggctgctgattttctcgtttgatagttgataataaaatattgccggcgtctgattgacttaattagacgtcggcgataaaaaagagaatagaaaggctattttatgttttctcattaatttctctggttatggcgctcgagttaacataatgttttctcaattgaaagggatttaattatgaaaaacataaagaatgaaatgagtgaagtgtcttacagcgttgtccacaaaatttgtatcattaataaaagcagtatcgattgtctagatgatgggaatgtcaataataacgcaagtggattatatggcggcaaaatatttaattctcccatgccgagcaaagatatttatgcctacaaggatataaaagatcaatcctgttatcgaattgattttatgtggtatttttaatttttcgtcgatagattggatgtttcaggtatgacatcgctccatggggcgaggttaaatgttgtggatgactttaattgtttatcaacgactggtgatgcaatgctggagtatgattcagctagcgatataacccattttcacatggcgaatgttaataatggcgttatggaagatcattttgaagtttccattattggtaagcttggcttggatacggattttattttctaagtcgatcaacatctggaatagcacatgtacggatattcctatgcgctattaatacaggagcagttatggtgaagcggttattacttcaaccttatcgaacatttttgtgtgccactttggcgttattaacctcaataagttctggagagattatggcaagcagccaggtattacctaaagccagcgatttaagcggtcaatggcaagtacagttaaataaatcagcagaaaaagcctgcagtattgaattgaagtccacggcaataaaacccaatctcacttggcatgccagcggcgatgttgcctgcttagaacaattgctgggcagcgcgccacagggttggcggccaacgccggatggtatcaccctgacggatcaaaccggtggggctgtggcattttttgagcgaacccaagacggttatgaaatgacgctaccggatgatgcgggagtaatgatattacgccgcgtacaggattaattttcgttacggataatctgatgacttcacttttacctaagagtgaagtcagaaaataattatcgcccgccagaaagccgttaaggaaaggttatggtttctcatccaattcgcaattatgaccggttacgagaggcgctgggcgcatgtcgacggagtttttacggcgtcggcattttcagcgccattattaatatactgatgttggcgccctccctgtatatgttgcaggtttatgaccgggttctggcctccggcaatgaaatgacattgctgatgctaacgatcctgatggttggcttatgtttttttatgggcgcgctagagtgggtacgcagtttggtggtaattcgcctcggtacccgattagatttgcgattgaataaacaggtatttaacgccgcttttgaacgtaatttgcgggatggagattctaaagctgggcaggcgctgacggatcttacccaattacgccagtttgttaccggtaatgccctgtttgccttttttgatgcgccatggttccctctgttcctggcggtcgtatttttgctgcatccgtggctcggcatgttggcattaggcggcgctgtctttctgattttcctcacttggctcaaccaatacgtaactcgccgccctctggcagaagcgaataaactatcgatgcaagcgactcatcaggcaaatacccatttacgcaatgcggaagtgatcgaagccatgggaatgttgggaaatatgcgcaatcggtggttgtcccaacactatggatttattcgccagcagaatcttgccagtgaacgttcagctggcgttaatgctttgtcgaaaagttcccgcataatcttgcaatcactgatgctggggctgggggctttgttggcggtgaaaggagatattactgctggaatgatgatcgccggttccattttggtggggcgagtgctgagcccaatcgatcaactgattggcgtgtggaaacaatgggttgcggctcgtcaagcatggcatcggctgcatttgttgctcgataatcacccgcatcgcgaagacgcaatggcgctgcccgcgccgaccggtcatttaagcgtcgagcatatcagtttccgcccgaatcataaccaagcgccgcgtttgcataatatccatttcgctttacaggctggagagactctggggattcttggcgcttctggctcaggtaaatctacgttagcacgcctgttggtggccgtacagccgccgacgcaaggcacgatcaggctggattcggcagatatgaatcagttggataaagaaatttccggggtttatatcggctatcttcctcaggatattcaactgttcagtggcaccttggcggagaatatcgccagatttggcgaaccagacgcagaaaaagtggtcgccgccgctaagctggctggcgttcacgaactgatactttctttgccacagggctatgacacggtgcttggggaaggcggcgcgggcctgtcgggtgggcagcgtcagcgtattgcgctggctcgtgcggtttatggcgatccttgtctgttggtgctggatgaacccaatgccagtctggatatggaaggggatcgcgctttgttaatggcgttggatgccctacaaaagcgcggctgtacgctgattttgatcactcaccgaccggcgttaacggcgcgggctcacaagctgttgattctgaatcaaggacagcagcagcggttcggtcccgcaggggaagtgatggcggagttgcagcagttgaacgcggcaaatcaacctgcattgaaacgcgagccgcaaacggcgggaattccgggttgagtgacaataaaagagaaaccaggcatatgtccgaagacaataaaaaaacggaactggcatttttacgggaagtacaacatagcgagaatcgggcgttgtactggggatgggggctggtcttggccggatttggcggctttatgctatgggcgctgttagcaccgctggataaaggcgttccggttacgggcaccgtggtagtttccggcaatcgtaaggccattcaacatcctgaaggcggtatcgtcgatcgtattatggttcacgatggcgatcgggttgaggccggagaggtcttaatcaccttaaatgctgtgcgggcgcgttctgccagcgatgggctgacgtctcaatatcatcaattattagccaatgaagcgcgtcttttagccgagcaaaaaggcgagtcacagttagttataacgccccgtttgcagcagagccgtgagcaaaaaggtatggtggaaattctggctttgcagcagcaattgctgaacagtcggcagcaggcgttgcaaatggaaactgatgcgctgaacgccaatattgccggattacaggctgcgatgggtgcacaaaagcaggtgaggagtaataaaaacagtcagcggcaggcgttatcccagcagctggacggtttgaaatctttggcagatgaaaactatgtcccgcgaaataaaatgctggaaaccaaacagctttattcacaacttaatggcgaaattgcgcagatcggcggcgaaatcacccgtggagagcgtgaaattcaggaacagggattgagaattaagcagcgccagcaagagtatcaaaaagaagtcaatactcagttggcggaggtgcaatctacattaacggaagtggctagccagttggaaaaggcagatttcgatttagctaatgtccagatgcgctcgccggtggccgggaccgtggtggaaatgaaagtctttaccgaaggtggcgtgattgctgccggtcaatcgctgatggagatcgtgcctgataaccagccgctgtttgtcgatgcgcgagtaccggtggaaatggtggataaaattcaccctgggctgccggtggaactgcaatttaccgcatttaatcagagcactacgccaaaagtagaaggttcggtgaagctgatatctgccgacagagtgttggatgaacgcactcaggaaccttattacagtctgcgggttgaggtcagtgatgcagggcggcaaaaactggatggtttacagattaagcccggaatgccggttcagggttttgttcgcaccggtgaacgttcgttgatcaactatctgtttaaacctctgatggatcgcctacatatggcattaacggaagagtagggagcgcaggatgccattaacgttacgaatcatttttctcaccttattagtattaccggggaggggaaacgcattgggtctgttggatgcgtgggaactggcggtgcgccacgatccgcaatatcaggctgcgggttatgaaagagacgccggtcaggaagaagaggcgttggggctgtcaggactactgcccacggtgcaatacagttatggcgctaacaataactcttccacggtaagccagacggataaccgaagcagcagcaaagtgaagcgcgattatgatagctatgtctcgatgttatctttacgtcagccgctgattgattacggggcgtacgcacgctatcggcaggggatcgcacgtaaactctttgccgatcaacgttttcgcgataaaagtcaggaattgatcgtgcgtttgtatcgcgcttatagcagtgcgctattggcgcaggaaaagaaatctctgctggaggcgcagctacgcgcgtatcaggagcaaattcagttgaatcgccggttgctggctgccggggaaggcactcaaaccgatattgatgaaaccgccgcgcgtttgactctgactcaggtacagctaatcgagcagcaggatgcgctggatagtcagctaaccgagttggaaaatatgattggccgctcggtggatctggcggagttacggccacttacgctggaaactttgccgcaaaatatcagcgatggacggacattggctcaatggcgagatttagccatgcggcataatgcacgcttggctgggcagcggaataacctggatgccaaacactatgaaatagaaagtagccggagtggacatttaccgacgttgcaattagttgcttcatcccggaattcccgctctgaatcggaatataactacaatcagaaatacgatacgcaaagcgtcgggctgcagttaaatgtgcctatttatgctggcggcagcgtatctagcgctacccgacaggcaaccgcgcactatcaacaatctcaggctgaattagatcaggaaacccgacaggtattggcggagttaaagcgtcagttcaatttaagtaatagcggagcagcaaaaatccgagcctggcaaatgacagtggattcggcgcagaaagttttgatagcaacgcgtcgtagcgtgttggggggggaacgaattaatctagacgtgttgctggcggaacagcagttattcaattccaaacgggatctggccgaggccaaatacggttggttgcagtcgtggctagagctacgttataacgccggtactttgcaagagaacgatattttgcaattggcggcctggtttgaaccggaaaagcgctagctgaaccgacagcctgtacaatagggaagcgcggcttcccttttttacgtccctattttcctatacagaaatattttcacaaaggcgtttagccagcacgcaacttgttcaccatattcttgccctcgatttcatccccgtggtttaaccgtaggtttgttagaaaggccgtaagctggatcaatggtgttagaccgtattctggtggataaaactgattttttaacctgaatcaacataatcagcgtctattgtggtgtattattctgccatcccgataggtagggttctccatcgggcttaacgtagtcagttaatatgtcgattgtcagaggagaggcgagatgcactcagcggccgattatataaccttgggtttgattgtgcttatttttggtttttgcctgtacggcttgtttggcgcaccaaagcaaaagtaacgattattcctatttctcgccccacccgttctgcgtggggctattttctttatcggtgtacttttctaccattcgttattatctctatctcgtaagattatatttaaaaatcataatacttcttcattttcgtgcatgtaaatgcccagctttacttgattattgttaggttgagtgaactatcgctagcgtacttttgcaaaaaaagccatagattaaattcgtctaaataacgcatttatactgataaaacgatttatccactgaagtagtaatgaaagggaatgggctatagttaacttattctaatcaaaatggtcttttagccgatgggcaatgtaacggcggaaacgacgggaataaatacaactattcacccttggtggctgcggctaacgcattgggtgaatgcgctggctattattatcatggtcactagcggttggcggatttataacgcctctccactgtttaatttttcttacccggattggatgacgctaggaggatggctaggtggcgcgttgcaatggcatttcgcagcaatgtggcttattttctttaacggcttgttttatttatttatgaatacgataaccggaagatttaaaggaaaattctggccgttaagcctgtctgcactttggcaagatatgcgagcagcgttaaccggtaaactcagccatgccgatttgcgccactataatatggtgcagcgtttcctttatttggtgaccgtgctggctttaattactctggtgctatctggtttagtcttatggaagtccgttcagtttccgttattgcgggaattactcggaggctaccctaccgctcgttatattcatttctttgctatgacctacatcgttttcttcacgctgattcacctgatcatggtgatattggttccccgaacattattagccatgattcgtgggcgctagaggcgaaaaatatgaaacagaaaatcagggttaaccctgcagtggatggtgacgaagtggtaaaagaagtcacgcgaattctggccaaagggttggattcagccagccgcaggcgttttctcaatcaaggattgaccttgggcggtgcgatgctactgaccggctgtgattttgatagcgacgcgcagatcgattcacagttaatgcgaatttctcgtttcaacgatcgggtacaaggctggctgtttaatcccaaaaatctggctccggtctatccggaatctatgattactcgcccgtttccttttaacgcctattactctcaggatcaaatccgtcaggttaatggggaaagtttcaggctcgaaataagcggtctggttgataataaacacccgtggtcattacctgagttatatgcaatggcgcaggttacgcaggttacccggcatatttgtgttgaaggttggagtgctattggcaaatggggcggtattcctttttcccatttcttgcgtctgatcggggctgatttaaacgctaaatacgttggttttaagtgtgcagatgattattacaccagcattgatatgcctacagcattgcacccgcaaactcaactgacattaacttatgatgggaaaatcctgcctgcggaatatggatttccgatgaagctacgtatgcccactaaattaggctacaaaaacccgaaatatattcagtccattttcgttacgaatacttaccccggaggcttttgggaagatcagggttataactggtttggtggcagctagtctgctctcaccctcaccctcagcctctactacttgacctaaaccaaaaaaggaatatgcgatgaaaaagcctattattctaatgctctgtagctgtattgcactgggaatgggagttgcccatgccgaggacactatgagcaacacggcaagtaaagaaatgagtatgaaaaaggatgatatgcataagcaggagatgatgaaaaaggacgatatgcataaacaggaaatgatgaaaaaggatgatatgcataagaaggaaatgatgaaaaaggacgatatgcataagaaggaaatgatgaaaaaggacgatatgcataagcaagaaatgatgaagaaagatagtatgaaaaaacccatgcctgagggtgaaatgaagaaagaaggtagctcttactgatgattaaccggccagagaaggtgtggccggcatcctgtctgtgatttaacgcattaatttgatgggctttttacttgggtaatcagccctaaaaactctcttttcaagaccgcttgagacataagttactcggccaaaaaccgggacgggagaacatcaccagatttccgagtaaaatcaggatcagaccaagtacggcattggcatgccattgataaccttcatagaaggtggagagagtgagcgctacaagtggaaatagcagagtactgtaagcagcagcgctggctccaatacgcccaaccagactgaagtaaagggcaaaagcgatagcggagccaaaaatagccagataaaacaaggcgccaagatagtgagcggagagttccagagtaaaactaccgtgctgtgcccaggcaataacccccatcagtatcgccccgtagctcatagcataggtattggtcgacaggacatccaaaccgcgtcgttgatgacggctgctaatcatatttcccaaagagaagccgtaggtacccagcaggctcaggccaattcctttgagtaattcaggctgtaattgtgtcgccataagatcgtgccagaaaagcgctacaatccccgtcagccctaatatgctggctggaataaagttagggtttaaacgttgccggaaaaatatgagtccgttcactgcattgaacagcaccgccatggagaaaataaccgattccagtccgctgctaatataagccgccgcttgataaaaacagtaaaaattaaaaccgaaaacgcacatcccctgaatgacgcaaaataggtgatcccgtaaggcgatacgtcgtaatcgacggctaaccaataggataatcagcatggtcagagtcgcgatgacaaagcgataaaaaatcgattgggtcaccggcacgctgccctgttgcatagtaatggcaatccaggtcgtaccccaaatcagaactacggcgctgtacaataaagcattcattgaatatctcgttcagaaaatcatgaaagagattatgattctttcgcccaatctgtgctttcagccctttgccagcatttgcataatcttgcgcatttcttaataactacgtagtgaatctctggtttgcatcacggcaactcagtaaactgtgaattctgtcatataaggagttgttgcggtgaaatccgagaattatcaggctttcgataccctgagaggccataaggcgcagctgcaaaattctgtgcggctcgggtctggcattcagttggcagcctggaccaacagtcaggattgcgtcaccctggataatccggatcaccatactctgagtttgtacgtggccgatggctatgagtgttatcacaaaaccgccggtggctggaaaaacggcggtggtccggatcggttttgtattatgccgaaagacagttattccagctgggatgtgcgcactaatctgtctttcgtccatttatattgcacagacgatcatttgcgttctttggccgagcagatttgggaccgaagtccggcgcagctacaggttgacgagcgcgtatttgcggatgatatgcaaattactttgttatatcggcaatttttactcagctgtgattggcaagatcgagccaatcagttgaccttgagcagcgccagtactttattgctgacccatatgttgcgtcattacacccaattgcagtgggcattaccgcaggtgaaaggcggtttggctcccagcgttttaaaacgggttcaggaatatattgaaagccaattgtctcagccattactgctggcggacctggccaaattggcggagcttagtgaatttcattttgcccgaatgtttaagcaaagcaccggattagctcctcatcaatatgtcatgaaagtgagattggagagggcggcttcattactgcgccacggcgatttgccgctgacagaaatagcattagcctgcggtttcagctcggccagtcattttagccaccgttttaaaagtgcctttggctataccgcctctgcgcttcggcaagaatcgcgctgatagtatttagctgatagtatttaaatgcagttaagcttaagccgcgataagttttcttggcgaaagagtttcggccgtcaaaatatgcagagtacgaattttgcccacgatgggcgatagcgttaaaaataagcctatctgacgtcaattgatatacctcaaagtgttcctctcttttcttcagcttattcattgcaacttttttgtggctatgccggaaaccgcatttttgcatgacctttcccgaggccggattacggctgaggtgacggccgtaaataacaaataatcctaagcgttcaaaggcaaattgacacagcgccttagatgcttcgctacatattccttgtccccactattccgtaccgatccagtgccctatttcgccttgattctgatggatatccattagggagatagcacctaacaggcggccattttcaatgtcgctaatagcaaaaacgaccgttttcatttgttcccaggttagcgaatggtcggtaatccattcttcggccagttcgacaggatagtgatgcggaatagtggcggtcatttcgacgatggcggatttcgaagaacaagatagcgggtaatgcagattttctgtctaaagagcggatacactgagtgccacaatgatgatcaataggtgggaaggaaaagtcagtggacaacgaaaaaatcaaacatttgcagggcgttagtgagaaagccagagcggtgatggagcgtgagaagatcgatgctctggtcgtcaccctgtgcgataacttttattacctcaccggttttgccagtttctttatgtataccttccgccataccggtgcggcggtggcggtattatttcgcgatccccacttaccgtcactgatcatcatgaatgaatttgaagccgctggcgtaacttttgatatgcctaatgtggagctgaaaaccttcccggtatgggtagacgtcgacgatccctttaatccagagcaatcgaataaacggcgagagcgcccgattggcccgccggtaacggccgtcttcaatttgttaaaagcggcattgtgtgatgctggcgtattggataaaaaaattgccatcgaattaaatgcgatgtctcacggtggcaaaactgtattggatcgcgttgcgcctggggtgcagtgggtagattctacgccgattttcaatgaaatccgggtgattaaaagtccgtgggaaatagcctatctacgtaaaagcgcagagatcaccgaatatggcattacggaagccagtaaactaattcggcacggctgcacatcatctgagttaaccgcagcctataaagctgccattatgcagcacccagaaaccaacctttcacgctttcatctgatcagcatcggcgagaattttgcacctaagctaatagcagaaaccgccggggcgcagcatagcgatctgattaaatttgattgtggcgtggacgtcgccggatatggcgctgatattgcccgaaccatggtgcttgggcaagctacgccgttggttcagcgaatttacgacagcattcgtcttggacatgaacacatgctgagtatggtcgcgcccggcgtcgcgttaaaagatgtatttgattctacgatggatgttatccggaaatcaggcttgaagcagtacaaccgtggtcatttggggcatggcgacggagtcttcctcggtttggaagaggcgccatttgtcagcacgcaggcgacggaagtgttccagcccggtatggttatgagcctggaaacgccttactacggccacggagtgggcgctatcatgatcgaggatatgatattggtcactgagacaggcattgagttcttgagcaaattgccgcgagaactggtttcccttccgctctgatggtcctggaaatctgagtaagatttcagcatgaaaataagtgatacgaagctggtaggcgatgatggctgccagcatttacggcatcagtcgggtacaggcaggagaagaaaatgcggtatatgaatattattcttaaaagagtctacgatgttcatcctccttatgatcccgatacttttctaatagatcgtctgtggccacgtggaataactaaagttcggctgaacggtgttatctggcttaaagagatcgccccaacgaatgaactgcggaaacagtttcatcaacaaggtgattggccggcttttgtaaaagattacacgatgcaattaaatagcaatgctgttgtatggcgtccgttgcttgaaatagcaaaggagagaccactgactttgctctacggtagcaaagacgcgcagcataatcacgctatcgtattgagaaactatttgcatgcttattgcgaatgatttaatgaaaagagggaggagatataaacagataattcgggtttggaatgaggaggaataaggtttgaatgattgctaccgttgcctacacataatccactctgcctttaattaaaagttgagaaaattcttattctagcgtgatggagataattaggttttttcctagctattgtcattaactcaacaaaatttaatgctatgcggctattgcttgacccttcattgaacatcccccccattagactcaatcaaaaaaatgacatcattgattaatatgaaaaatagaacgctaaccaattcaatagattagccctgaatagggcgggctatggatgataaaagcacgtgtctataaaaaatcaataagcttattggaataaatgaatttccctatcttttaatataaatattcttttccgtaattatatctaggtcaataaactacttatttctaggcgcgttctgctttattttgacatcttgttatgcaacttgttgaattttaagttttttttgttgttttttcaaatcttcattttgtctgcttggcgcgatattttgcgctaaggaattgcgtagatttggactattcagttgtttattgtgctttatgtggcaagaatgcaggtggatggcctttaaatatcggttaagtcaggctattgaccttactttttgaataaattatctttgtaagaaatcgacaggcgtattttctttaagatactataattaacatcttgcaatcttttcatctcagctgaatctcaccttgtttttattgggatacggatgttgctcgatagtgctgttttatcattaaacaaaacgttcgctaaagggttataaaatgagtaaagcgatattaacgctgctgcgtccatttcaaagacccagaatgactttattggcattatttgtttcagggctagcagttaatccagttgtcgcagatacacactatgattcattaattattcaagcaagggatggcaataccacgccaattctagattttctacaaaaagcgtcttctgcaggaatgcttaatagcgggcaggttgccgactggctacaaattgccggttgggcagggcacgataatgacgttattgccatttatcaacgttatcaatccagtatgcaaataccggccagaggattggctgcggtcgcgcgcgcctatcgtaatcaaaaacgttgggatcaggcgttagcactttggcaggccagcctgaaagctgatcctaataacaccgaattgatcagtgcgatgatcatgactcaggctgacgccggtcgtgataaagaggcattgcaaaaagccaccgaattggtgaagagaacgccttctgcccagagctatctggcgctgtcctatttgcacagcgcggccaatcgtcactacgctgcactggaagcggcgaccaaggcgatggattttacaccggtctcccccgaagtgataaagaatcatgttgccatgctgcaaaagaaccgtgtggcggctcccgcattaaaagttgcgcaggaaaatagcaaactattcactccggcgcagatgcggcagcttgaaagagacgcgctggcggaaaaagtacgccaggctagcctgccgacacgcagcgaacaacagcgttttgatctggccgatcaagcgttggaacactatcttgcgctgctgatcgcgtggcagaacaaccccgaaacccagacggactatcaacaggcgcgtattgaccgactgggggcaatgttggctcgcgcgcaaatgacccgtctgattaacgattatgaagcgatgcagcgtgaaggttataccctgccaggctacgcgcagcgctgggcggctagcgcctatatcgaccgtcgtcagccggaaaaagcggcggccattctcagcgacatgtacttcaaagacggcaaaaccgttgcgaagaatatgggactggaagatattgatgccacttattacgcgttgctggagagcgagcaactggataaagctcaggcctttgccaatgcggtgagcaatcaggcaccttatcagctgtttatgtataacctgccggtcagaacaccaaatgatgaatggttggaggggcagtttttgttggcccaatcggaagttaattctgatgaattaccggcggctgaacgtcgtttaaccaagctgaccggtaccgcgccggtcaatatggatctgagaattgcattagccaaagtgtatgccacgcgcggctggccgcgtcgggcagaaagagaactgaagcaagttgaaagcctggagccgagcagtattactcttgaggcggcgcaggctgaaaccgcgctggagttgcaagaatggcggcagtttgaattactgattgacgatctggttgcccgcgtgccggaaaacgtcacaactcaggagctggctcgtcaacgtcagattcgccatatgtcggagctgcgcatttccggcggacgcactttggcatcggatagtccactcagcggtaaaaacgatcagggcattgaggcgctattgtatagcccgcccattgatgaaaactggcgcgtatttaccggcggttcctttgataatagccatttcgaagaaggccgtggcatcaaccgggtgctacgtttaggggccgaatttactgctcgcaataactgggtagaagctgaggtcgccaaccataattatggttatggcaataaggtcggcgggcgcttatccgcttggcatgacttcaatgaccattggcgcatcggaggttctgcggagaaactggcaaaaaacacgccgcttcgtgccttgaaaaataacgttaattcggacagcgcaaacctgtttgtccgttggaatggcagcgatcgtcaggatgcacagctaagcgtgacaccgtcacacttctctgacggtaaccatcgttgggaatacgcgttcaacggtcgccagcgggtgtataccgcgccgtacttgtccgtcgatctgaatctggatttgtccagtagccaaaataccaaagaagacaccttgtattacaacccgaaaagggacttctctgccgtgccgtcgctaactttcgaccacattatgtaccgtcgttataaaaccgtctggagccaacagcttcagctcggagccgggacgtattgggaaaaaaattacggaaccggagccgtaacctccgtgggttatggacagcgcattcagtggaatgacgtagtggataccggtgtttccgtaacctgggataagcgcccgtacgatgggaaacgggaacgtgacgtccagctatcttttgacatgaactatcgcttttaaggaatcctcgccatgccgacattctcattcttaatccggctgctcgtggttgggatagtaacgctggtgcctgcctcttacgcggagtcagatattccagagtttaccccaccggcgatgcggacgttgccgcaaagtgaaaaaccttggaaaaccaatgactttgtggttatcgcctaccacgacgtggaagacgtagctgccgatcagcgctacctcagcgtgcgtagcagcgcattgaacgatcaatttgcctggctgcggaacaataactatgttccggtctccattgagcagattttaaccgcgcgtaatggcggtaaacctttgccgaaaaaggccgttttactgacgtttgatgacggttacagcagcttttacgaaagagtttatccgctgttgatcgcctataactggccggccttattggcaccggttggcacttggttggatacgccgatggataaaaaggtgaactttggcggattaatgactgaccgcaagcgctttgctacctgggatcagatccgcgaaatgtcgcgctctggtttagtcgaaattggtgcgcatacctatgcttctcactatggtgccaacggcaacccgcaagggaataccgaaccggcggcggtgagccgtatttacgatcgtaaaactcaaacctacgaatcggaagccgcttatcgtcaacgcatggaaaaagacgtggcgctgattactgagcggatcaaacaggctacgggaaaatcgccgcgggcttgggtctggccgtatggtgcggcagggggcacggcgctggaaattgtcgccaaccacggttatcaactggccttcacgttggagccgggtattggcaacgtgaataatttaatgagtattccacgcattttgatcagcaataatcctcccatcaaagattttgcgcagtccgtcaatagcgtgcaggaaaaagagatcatgcgcgtggcgcacgttgatctggattatctctacgatcccgatcctgtccagcaagggaaaaatctggataaactgattcagcgcatttatgaccttcggataaataccgtgttcctacaggcattctctgatccaaaaggcgacgggaatattcgtcaggtgtatttccctaaccgttggataccgatgcgtgctgatttgtttaaccgggtttcatggcagctggcctctcgcgctgaggtgcgggtttatgcctggatgccggttctggccttcgaaatggatcctaaactgccgcgcattcaacggataaatattgaaaccgaaaaggttgatgtcgatcccaaggcgtatcatcgcctgacgccgtttaatgcggtcaaccgtcagcgcattattgaagtgtatgaagatttggcgcgttatgcgccgttctcaggcattctattccacgatgacgctctgatgagcgattttgaggatgcttctccggatgcgatggcggcttacaaaaaggccggtttccctgattccattcaggctattcgtcagaacccggaaaccttcaaccgctggactcggtttaagagccagtatttaactgatttcaccaatcagttaatggagcacaccaaagcgattcgtgggccgcagattaaatctgcccgcaatatctacgctatgccgattatcgatccaaaaagtgaagcctggtttgcccaaaacttcgatgagttcctggcgaattatgactgggtagcaccgatggcgatgccgttgatggaaggcgtgccaatgtctaaatctgacgaatggctggcgaatatggtgaaaaccgtggctaaacggccgggggctttggataaaaccgtctttgaattgcaagccttgaactggagaaaagccgaggggcaggatgaaatcagcggcgaagtgttggctgattggatgcgccaattgcagcttaatggcgcgcaaaactttggttactacccggataacttcattaccagcgaaccacagctggagactatccgtcctgcgctctcatcagcctggtacccactcaaatgacagatagaataattgcttttattatcttatgtttagtgttgagtatcccagcgggaatggtattgatgttcaccggggatgttctgctcaacttcgtgtttttctacccgttatttatgtcaggaatctggataaccggaggggtctacttctggctacgtcgtgagcggcattggccgtgggggggcgatgttgaaccaccggaactgaaaggtaatccgctggtttccattcttatcccatgctttaacgagggattgaacgcgcgggagaccattcacgcggcgctggcgcagacctatcagaatatcgaagtgatcgccattaatgatggctccagcgacaacaccggcgaagtgttggatgaactgcaaaaggaagatagccgcctgagggtgctgcatctggctcaaaaccagggtaaagcggttgctctgcaaatgggcacagccgccgcgcgcagtgaatatctggtgtgcatcgatggggatgcgctgctggataaacatgcggtgccgtatttggttgctccgatgattgaaaatccacgggtgggggcagtgacgggaaacccgcgtattcgtacccgttccacattaattgggcgtattcaggtcggggagttttcttccattatcggtctgattaagcgcactcagcgggtgtatgggcaggtattcaccgtttccggcgttgttgcggctttccgccgtagggcgctggccgacgtgggatattggagtccagacatgattaccgaagatatcgatatcagctggaagttacaggtgcggcattgggcagtgttctttgaaccgcgcggcctgtgctggattctgatgccagaaaccttgcggggattgtggaaacaacgtttgcgttgggcgcagggcggtgcagaagtgttcctgaagaatatgttcaagctgtggcgctggcgtaatcgtcggatgtggatactgttcctcgaatattcgctttctattacctgggcctttacctacgccatcagtattctgttgttcttcgttggctttgtggtgccattgccgccgggtattcatgtggagaatatattcccgccggcgtttaccggcatggtgctagcattgacctgtttgctccagttcgccattagtttggtaattgaacgccgttatgagccgaaactgggcatgtcgctgttctggatcatttggtatccgatggtgtactggatgctgagtttatttactacgctggtcgctttcccaaaagtgatgctgaaagtgaaacgtaagcgtgcccggtgggtcagtccggatcgcggtattgggagaatcaaagaatgagtgcgcctctgattcaaaccgagcagcgtttgctgccgaaattgatagatatcatcattaccgcgtttgcctggtgcggttttatctatctgtttgtcaatgggttgcttgccactgtccatcatgccccgcacgcggggacgattccgctgcatatctatctgctggaagggttaagtaccatcgtgatttatttactgattgcgctatttaacgccttggtactgattgcgtgggcgaaatataaccaggttcgttggcgggttgagcgtcgtcagcatcgtcctcatttagaggatcatgaattagccagcaccttatcggttcaggctgaattaattgctgaattaaaaggcggtaataatttcgttctgtataacgatgaggatggacgtttggtggatgtgaaactcggcaaccgtcattaagttaaatattctgagataagcatccctcggccaggctgggggatgctgactttatcctgatgctttatcatcggtgagtggttaggattcttcgttatcatcgccgtaatataaggtgccgatgcggatgatatctcgcccctgcgttttgcggtgtagattggaatcgcgtagggaataaatgcagccacaatattcctgctgatagaatttttcccgcttactgatttcaatcatgcgcgatgaaccgcccatttttcgccagttataatcccaataacgtatccccggatatttatccgccgcacctttgccacagtcatttatttgctgcatatttttccagcgggaaatgcccaatgagctggaaatgacgttaaaaccgtgttcataggcgtatagcgcagtgcgttcaaaacgcatatcgaaacacatggtgcagcgaatgcctcgctcaggttccttctccatccctttggcgcgttcgaaccagttatcgctatcgtaatcggcgtcaataaaaggaatattatgcttctccgcgaagcggatattctcgtctttacggatcaaatattcacgtttgggatgaatattcggattataaaagaagatggtgtactcgatgcctgacgcatttagtgcttccataacttcgccggagcaaggcgcgcagcaggaatggagcagaagtttactctggttatcaggcagcgtgagcttgggacgaataaagtcaggcatatttttaaccgtaaatttaagtagttagccttaagtgtgtcgtattcttttctttgggtaaatcattttacgtttattacaccccatttaggaataaatgcaacagcgagagcggaatcgtttaccgttgatttcatgatcaatagttgacgaataatactgtcacgttcctccttttttctttcgcttatgctagcttggaaccgggaaaaagatggcgagcgttttcaatgtataaagagggatagccgtgagattaaatgagtttggacaagcaattggcgacgaattggcagattggcaaggcgcattgttaccgcaaaaagaagtgctgaacggtcgtttctgttatctggaacccgtcaatatggccaagcatgaaaaacagctgtatcaggcttatcacagtatagaagatgaccgcgattggacttatctcttcaaagcgcgtccggaaacagaggctgagtttcatgactatatgctaagcatgattaacgctaccgatgccgtgcattatgccgtgatggatacgcatggaggccatgtaataggcacagtggctttgatgcgtattgataataacaatggcgtaattgagataggctcggttaattggtctccattactgaaaagaaactctgccggaaccgaagccatatatcttttactcagctacgtgttcgataccttaggttatcgccgttgtgaatggaaatgtgattcctgcaatgagccttctcggaatgcggctaaacgctatggttttaaatacgaaggccaattcagacaggccatagtggtaaaagggcgtaatagagataccgattggttctcgattatcgatggtgaatggccggaggttaaacgagcgataacacaatggttatccacagaaaatttcactgctgacggaaaacaaaagagacgcttacaggattttcaaacggcgatttaagctattcgctgccttgagttattcaggcgattgcgtgttctatgagcagggaggcttatagggttaatgtgtacattggcactattgtcgattgctattatgttggagacaggcaaagggtaaataacggaaaccgaccatgttttaataagaacaaaaaacgtacagcataaataaattatatttttttacacttgcagcacgcgaaatgtgagagtgtcattatactgtaatcatctggcggtaattttcacacggtgtacagcttaggctgttgtttatcactgcgaggatcgctaatggtaaagtccttgtttgggctgttgagacaaaaccaagtatttactacagaaactcgttgtaacgagggccggctcaccgaccctgaattgtcaaccaagatccaaaaccctccctctgattttttatgttcatccctgataagttcctcctgcattaatctgaaccagacaaaacccagtacggtttatcgttcaggttatttgcattttttattggctcttattggctgcaaaggaagccaaaacctaatccgtatgtgaaacataatcgcgcaggcaatgactgctgcggtaggtgaaacaaactgtaaggtgccactatgggaagacaaaaagcagtgatcaaagctcgtcgtgaagcgaaacgcgtgattagacgtgattcacgtagtcatcgtcaacgtgaggaagagaatgtgacatcgttagttcaaatgggcggtgttgaatctatcggtatggcgcgagacagccgcgatacctccgctattttggcacgaaccgaagctcagggtcattacttggaagccatagccagtaaacagctcatctttgccaccggcgaagcgggatgtggtaagacttttattagtgctgccaaagcggcggaagcgctaattcataaagagatagataggattattgttaccagacctgtattgcaggctgatgaagatctgggtttcctgcccggtgatatttccgagaagtttgcgccttatttccgtccggtttatgacattctactacgccgtttaggatcgtcatttatgcaatattgcctgcgcccggaaatcggtaaagttgagattgctccctttgcctatatgcgcggacggacgtttgaaaatgcggtagtgattctggatgaagctcagaacgtaaccgccagtcagatgaaaatgtttctgacccgattgggtgaaaatgtgacggtaatcgttaacggtgatgttacccaatgcgatttaccgcgcggcgtgaaatctggcctcagtgatgcgctggaacgtttctccgaggatgaaatgatcggcattattcgtttcgacaaacaagactgcgtgcgttccgcattgtgccaacgcacattaaatgcctatacctgataatactgtcgcgagatgctaaaacagattgatggacgcggagctattttagaatcgacggtgggataggttggaataaacgctagcgtaattggcagtacaaccgctagccgttcaacaggtaggttgtacgacagactattttaatgttctacaggcctccgatattactatcgggggcctgattttttcaccgctgtcaggtatttttgctaaaaaaatgactcttgtgccgaaatattatcgtcaaacatgagatttgtcgctttgaagcgcaaggattccaaacgataaaatattggccttatttgcatcattcaatttcgctggcgtgaatcctcaggccttattagcactggctacgagagtgaatcagcaaaatctgggcgactctttggttatttaacccaaatggtgttcatgataaaacgcctgggcttaatgctgccttaataaagagtgggaagaggtgagatatggaaataaccactcgtctcattggtgtgtcgtcattaaaaatagggaaaccacgggcaggtctgctattgggtctgatattgttggtgggatgcacctcgcagcagcaaccaccgatggaacagcagagcgaaaaatatcaatatcgggttgggcacgaagtacgttctttggtttctttcgatggagaacagaattatgactgatgtgtgtccaatgggatattggatgccatagaacagcgtttatttggcacagtgcatttattcagttaacagctagtcaggcatcgtcggatataaataaaaagggcaagccataagcttgccctagattatttgtgtcgattcggaattacagcattatggtcatcatataagcggcgaacagtgccaaatgcgccgtgccgtttaacacgttggttctcccgctggagaacgacacctgacaaagcactaatacgctgaccatcaccaccatatggggggcttccagaccaaaggttaattcctgtccggttaataccgcaatcagggtaacggctggaaccgtcagggaaatagtggctaatacggaaccgaagaataggttcattgcccgctgaacctgattagccaatacggctttcaatgcgcccaaaccttctggtgacaggattaataaggcgatcaggaagccggtaaatttggccggcgcattcagttcagtcaataaactttccagcgggttggcgtcaaacttggtgaccgcaataacggcgatcaggtgtaccagcagccagcaggtatgccacaggctactgtgtgatgaaggttttccgtggtgcggatcgctcggatcatcgctttcatcttcgtgttcatagacaaacagactttggtgagtcttggtttgaataaccaggaagacgccgtacatggccgcagaaatcattgctacgactagcgcttgcgcgacgctgaaatttccgtcgggtagggtagaaggcaaaaccagaacaataatggctaatgggaatattgccattaaatattgtttgatgccgactaaattaacgtgctgagtggcaaattttcggccgcccaaaagcagagacacaccgaccagcccaccaatcacaatcataataatggaatataacgtatcccgcattagcgctggggcagcgtcacccgtggccatcatagcggaaattaagctcacctccagtaccacgacggagaggctaagaatcagcgatccgtagggttcaccgaggcgatgagccagcacgtcggcatggcgaaccacgctgaaagcgctgctaagaatggcgaccagagcaatcaggttaatgacaatgatagcggtgaagttgttggtatcgccccagacgttgagaatagccaatgcgataacaggtaaaatcagggaatactcatgatggcgagatttagatcggccaggatcgttttgcgacttcatttgaggtgcgctccttattattttatagctctaaagtggcgttaactccgtttgacgcacataaagcgactatttacaaaaaaaagagactaagattagcaaataacaagggtttggcagagtttctttacacgttttttaaaaaacaatgatatttggttaattagcttattaagaatggacatatcagggcgatatgtccaagtggatataggatttatttcgaaatttaaccgtcgagattatccatcacatcatggcgcttctgatggtaagcctcttcattcatcccttcgcgccagtaagggacggcgtaaagctgttcgcgttcacagcctttttcgcggcgcaaatagcggcgtagtagcaccactaacttgtcttcaccggccagccaaaacatcacattttccgtaggcaaggcgaaagaacagaattgagtgacgatttcatgagttttctcggttcctccgataacccaatttagctcaacgccagctggtttatctaaatccagcacatcatgcgcgctatctacgcgcacgatgacctgaccttgcgcgtgagcaggcaaggtttccaacagagcggcgatagctggcagggaggaagggtcgccaaccagataataatgcagtgctggaggtaacatcggctgtgggccaccgggattgctgatgccgatccagtcatttttctgagcatggcgggcaaaatctaccgccggacctggatgatcgtgcatggcgaattcaatatcaatttcaccggaagcagggcgcaccgcgcgtaccgtatacgtgcgtacaatcggccgcatttccccctccggccagatagggcctttatcggtcaacaccggcaatgcgggttgggtttgtcccggctgaggcaaaaatactttcagatgcgaagcggcgcagtctgctggatagtcagctaatgaatcactgtggaaagtaatacgtcgcaggtgtggtgaaatatccagcacttctttaacttgtatcaaacgaggtggcgtcgggcgtttcgcgggctgattggcggtggtgtctgtagtcactctctcatccttttcattctattggatattcagctaattggggcgcagcggaatagatgaaacaattgtatcactgagttgtgtgaatgataattatttgcatgaaccgaaagtgctatagaacgtgccgtgacgggattattgcgaatgactattaggtttgtaatttatctggctatgtattctgctgcgtcatccgactctggcagcgcagaatattaaatatcaggtactggcagaagaaagggatcaaggcgctatcgattatcagatttaaaagtaggcggcggggaaattcctccgcccgtatttatttaggatttcaatcaaactagatcgtcattatccggagtaaattgaattcgtacttcggtgccgccttctggccgctggcgtatttcacagtgtccgcccagattgttcgcgcgatcttgcataatcatcagcccgtagtggttgggccgtgcgctactgtcgccaatacccaacccattatcctgaaccaccatcaccacctcatcgttatcgcgataaacccgtatggaaacctcggtagcctgagcgtgtttatagatattgctcaaagcttcgcgagcgacctgcaccaaatgaatagactgatgaacaggaaccccatcattaggtaactgataatctagattaaccggaataccgatacgttcgctgaactcggcggcggttgcctctaacgcggcgcttagcgtagcttcgctcagtttaagccggaaggtggttaacaattctcttagctggcgataggcgatatttaactcttcgcgcatttgctgcatcaatatctgactggcttctggcagatccctggtttgctgctgcaggcaacttatctgaattttcaggcaggaaagggattgagcaatagaatcgtggagctcgcgggcaatggccgagcgttcgttcatgagtagtaattgctgttgatgtttagcctgactctcaagcgccagcgtactggtcaactgttctaccaacatgtggatcagctgcaactgttcatcactcaaagggtgattcaccggctgtttagccaataataagccgtattgttccagcttatcgctcaggctccaactcagggattcccactgttgatctggcgtcaaggcgttctccagctcgtgactgctgataatggttccctgggcagtatgcagcgggttggcctgaccttcgcccccatttttatacaggcaaatctgaatgtttttcagcggcgttaataacttcagctgattgattatgggttctaaacgatccgccagcggctggtgggtatgtaattcctggctgctttggtaaagaaaggccagcacctgatttttctgctgtaaatcagcggttttttcagccactcgctgttccaagtcggcataaatcaatgagagttcctgcgacatgcgatttaatgccagaccgagtgtgcccatttcgtcacggtgacgagtcagggaataacgatggctaaaatcccctcgggcaatggcattagccatggtgatcagttgcagccatgggcgaagcaaacggcgacgtagataaaaggttgtggcgagaagcaggatcagggtcagcgcgatgaaaatccattggatgacggataccagaacaatacgctgttccgttttgtgatcgatggcgagtaccagtgcatccaactggtggacgaaattggcaacctgctcagccgcgtcttcggggcgttgagcctgctgtaaacgaggtttaagagtttggatccagtactgatttagtcgctggtactgttcggttaatccttcccgctgtagggattgttgcaggtcagcgctggttttatcctgctccagcgcatcgagatagggtaaatcatggctatccagcggcaccatcgacagcaaacggtagctttgcatgcgtagtgacccggccttattgatagcgtgggcgttaccctgaatactttgagccatccacgaagagatactcatgccggccagtcccagcaggcctaaaaacagcattagcagggcaacctgattaacaatcgggatcaggtagcgtttcattcagcggaattcctttgagcaataaacgccgctaccttaccgtttttgtggataaagtgttagtgctaatggctcttcattcccgcagcggtcatcagcatacggaacagcatggagacggccagtagggctaatacgctgccgcaccaaatcaacaccagccagcccaattttttccaccaaggtgccggtgttgacagccttgtcgaagcgggagccgtttttttaaacataggatttcctgttgttcaaatgaatccgaacgggctgggatcgccagcccggagaaatcagtgatagccctgatcgtgattgatttttccccggaacacgtagtagctccagaaggtataaaccagaatgatcgggataataaacagcgcgccgaccagcataaagccgaggctttgcatgggcgcagcggcggcccagaaagtaatggatggcggaatcagataaggccagacgctgatgcccaaaccgctgtagccgaggaataccagtagcagcgtcagcaggaagggcgcatagtggccgcgatttttgacgctgcgcaacagcgcccaggtggcgaccaacaccagaataggcaccggcaggaaccagtacagattaggcaaactaaaccaacgttcggcaatttgcgggtgcgccaacggcgtccacaggctaatcgcgccgataaccagcagtaggagtaaggtcagcggcgtagccaagcgcagcatggtatcttgtaaatggccttcggttttcatcaccaaccaggtacagcccaacagcgagtaagccacgaccagccccaagccggagaacagagcgaaaggcgtcaaccagtcgaaagaaccgccggtataggcgcggcccgtgacttcaaacccgttgataaaggcgcccagaaccacgccttgggtaaaggtagccagcaatgatccgccaataaacgctttatcccagatatgctgtttttccggcgtagccttaaagcgaaattcgaaggcgacaccacggaaaatcagccctaatagcatcaaggtgagagggatggttagcgcgtccaaaatcaccgcataggccaaggggaatgcgccaaacagcgccgccccgccaagaaccagccaggtttcgttaccatcccaaactggggctacgctgttcatcatcaaatctctatcacggctgtctttcaccaacgggaaaagcatgccgatgcctagatcgaaaccatccatcaccacatacatcatggtgctgaaaacaataataacgaaccagattagtggaagatccatacccataattagctcctgcggctttcagaatggttattgtctaggctgtcactgacggcggacagcggtcgtgccggagtacgctgttggcctgggccgccttgttccggtgaatcaccttcgtgtttgaccgggcctttgcgaatcaggcgcatcatgtaggcgtaacccacgccaaacaccgagcaatacaccagcaggaaggcgagtagcgtgatgctcatatggatttcgccgtggccggaaaccgcatctttagttcgcatcaacccatagactacccaaggctggcgtcccatttcagtggtaaaccatccggccagcaaagcgatcaaaccggacggtcccatccacaggataaaatttaggaaagctcggttttggtataaaccgccgcgccagcgtaaccacagactccacacgccagccacaatcatcaacatccccaatgccaccataatacggaaggcccagaacaccgcgggtacgttagggcgatcttctggcgggaaggatttcagcgcgggcacctgtttatccaggctgtgagtcagaatcaggctacccaaataggggatttccagagcgaaatggtttttttcctgctccatatccggcagaccgaaaagcaccaacggcgttgcctcgccgggatgattctcccaatgtccttcgatagcggcaattttagctggctgatatttcagcgtattcaagccgtgtgcatcgccaatcagcgcctgaatcggcgcgacgatcagcgccatccacatcgccattgacagcattttacgcatggcggaagtatcgcgaccacggagtaaatgccaggcggcagacgccccgacaaagaaggcggaggacaggaaggcggcggtagacatgtgtgccaatcgataagggaatgacgggttaaagatcacttcaatccagtccagcggtaccacctgcccgttcaccacttcaaagccttgcggcgtttgcatccagctattggaggctaaaatccagaaggtggacatcagcgtgcccagcgccaccatgcaggtagcaaaaaagtgcaggccggggccaacgcgattccaaccgaacagcatcacaccaagaaaaccggcttcgaggaagaaggcggttaacacttcataagtcagcaaggggccggtgatactgccggcaaattcggagaaaaagctccaattggtgccgaactggtaggccataaccaaaccggacaccacgcccatgccgaagttaaccgcaaagattttcgaccagaaatggtaaagatcgcggtaatcctgatttttggtttttagccacagtccttccagcaccgccagaaagctggctaaaccgatagtgattgccggaaaaataatgtgaaacgaaacggtgaaagcgaactgaatgcgggccagttctagtgcagttaacccaaacatagggaccccttatcaaacatggtacttccttttatttttcatagcggtatatcgcaataacgcggcaggtgatggttatcgccgtgaaacagatagcgccgaaccggaaaaccctgtccctgtgggagaattattcgaggcaattgctgagatcctaaaccggtcatgcggcgggttcatcaatgcccgaggcggtttttcgggctggcgggcttggcagcaagttaaccacaggttaaagtaggtataatagtgacagttaacgcaatattacctataacagatgaattatgacccgatatgagcaattagccagccagattcgtacccaaattcagtcaaaagtatggcaggccggggataaactgccatcgctacgagaaagttgtaagcaatctgggctgagtctgatgacggtggtgcagtcataccaactgctggaaagtcagggctggatcgtggcgcggccgcagtctggttactatgtggcatctcgacctacccaactaccgcagccgcaacgcggtaccaagctgcatttgtccgagcaggtagatatcaacgcctttatctttgatgtgctacaggcggggaaagattcggcgattatcccatttggttctgctttccccgatcccagtttgttactgcaaccgcggttatccaaagcgctggccagcgtagcgcggaaaatatcgccacaaagctcggtcactaacctgccgccgggtaacgagagcctgcgaaggaatattgcccaacgctacgccgccagcggtatgaatgtttcgccggaagaaattgtgattaccgcgggcgcaatggagtctctgagcctgagtttgcaggcggtgacggagccgggagactgggtcgtgattgaatcgccggcattttatggcgcattacaggccatcgagcgtttgcgattaaaagccattgccattaccactcatccgcagttgggtatcgatctggattctttggagcaggttatcggccaatatccgattaaagcttgctggctgatgactcatttccagaatccgctgggttccaccatgccgtggagccataaacagcggttggtcaacctgttacagcagaataatatctcgctaatagaagatgacgtgtatggcgagctgtattttggtgcggaacgaccactgcccgccaaggcgttggatcagcatcgtcaaattttgcactgttcctccttttccaaatgtctggcacccggttttcgcgtcgggtgggtggctgcgggggctcacgctcagcgtattcagcatttacaactgatgagcaccgtatctgccagtgtgcccactcaactggctattgccgattatctcactcaaggtgggtacgatacgcatctgcgccgcctgcggcgggtgatggaacagcgattgaacaccatgcatcaggcggttgcagaagctttcccgcaaaacgtgaaaatcagtcatcccggcggtggtttctttttatgggtagaaatggaaccgccgtttaataccaatgaactttatctacgcgcgttagagcaggggatcagcattgcgccagggaggatgttcactaccgggaagcagtttgatcactgtttccgcctcaatgcctccttcccatggagcagccacagcgagcaggctattaaaaccctcggccaactggtttatcagctcagtgcgcgtcgttagagagggatattcacagcgcgaacacgcttaactcttttccaaccaaatcgcgggtgagaataatgctcacccatcgacctgctaccagacacaaattcgacagaacaaacgcactaaattgacgcattcaccgcccatatatagggcgttagcatacacgcctgttattattgtgttgcataaatgtgatcgtgcagagcaaaaatagaacttcacattatttgaataatgtttcgcctagcccccggtaattacgccattccttgataaattaatgcacgataaattgcatcttttgcataattatgcattttaaactcttgtttttacgaaaaaaatacattttattcacatattgggcttgctagcataaaagctgctctacactttatatcaagtgaatctgtttcattctgaatagttaacaggatatacgaaaggcgactcaatcgacttcggtagtcgccatttcgcgacataacatgttacctccgccgtactcactccatcaatgtgaggcgacggcggcaaaagagagtgccattggctcgccagtaagcattcacaccccaaactcatgctgagaaagaggtttatatggaacagccaatcccggtcacccgccaatcatttgatgaatggctagtgccaacctatgcgccggctgactttattccggttcgtggcgaaggcgcaaccctgtgggatcaagaaggaaaatcttacatcgattttgccggtggtattgcggtcaatgccttgggacacggacatccggcgcttaaagctgccttgcatgaacaggcggaaaaactgtggcatttgggcaatggttataccaatgaaccggtgctgcggttagccaagcaactgattgacgcgacttttgctgaaaaggtttttttctgtaactccggtgcggaggccaacgaagcggcgctgaagctggcgcgtaagtatgcgttagatacctacgccaacctgccggggcaagtgggcgagaaaaatcagatcgtggctttccgcaacgcgtttcatggccgcacgctattcaccgtttctgctggtggacagccaaaatattcgcaggattttgctccgctgccaggcggtatcagtcatggcatttttaacgatctggcctcggcggaagcgttgatcaatcagcaaacctgcgcggtgattgtcgagccgattcagggggaaggtggcgtggttccggcggacgccgaattcctgcgcggactgcgtgctttatgcgatcgccataacgctttgctgatttttgatgaagttcaaaccggcgtcggccgtaccggcgaactctatgcctatatgcattacggcgtaacgccggacgtattaaccagtgccaaagccttggggggcggcttcccaattgctgccatgctgaccaccaaccgttttgccggtgcgctcaacgttggtagccacggaaccacttacggcggcaacccgctggcctgcgccgtggcgggaaccgtactgcggttgatcaacacacccgaagtgctatccggcgtgaagcagcgtcatcagtggttccagcagggattggcaaacattaacgcccgttatcccgtgttctccgagatccgcggtagcggtttactgattggctgcgtgttaaaacgcgaatatgccggtcaatccaaagccattattcaggccgcggccaaacacgggctgatttcgctgattgccgggccggacgtggtgcggtttgctccttctctcatcatttctcaatcagacgtcgaagagggactggcacgtcttgcccgtgggattgcgcaggtttgccagtaggattaacgccgtaaaaaaggaccttgattatgatgattattcgcccggtagaacgtcgggatctggccgatatcctggaactggctggaaaaactggcgtcggcatgacttctctgccacaaaatgagcaacatctcgcagcacgcattgaacgggcgttaaacacctggcaaggaactttggctccgggcgaacaggggtacctgttcgttttggaagacactgagcgtcaaaaggtggtgggcgtcagcgcgattgaggttgccgttggcatgaacgatccttggtacaactttcgcgtggggacgctggtacatgcgtcgaaaaccctcaatgtctacaagtcggtgccgacgctctttttgagcaacgaccacacgggctacagcgaactgtgtactttatttctcgatcctgaatatcgccagggaaaaaatggtcctttcctttctaaagtgcgctttctgtttattgccgctttccgccagttattctcgcgcaagctgatcgcggaaatgcgtggttttaccgatgaacaggggcgctccccgttttgggaaaacgtcggacgccatttcttttctattgaatttgccaaagcggattatctgagcggcactggtcagaaagcctttattgcggaattgatgccgaaacatccgctttacgtagattttctggcggccgaagcacaggcggttattggccaggtacatcctcatactgcgccagcgcgagcggtgttggaaaccgaaggcctgcaataccaagggtatgtggacatttttgacggtggtccaacgctggaagccaatacggatgaaatccgtgcagtgcgccaaagtaccaaacggcaggtttctattgatgatgtcattctagacggcagcggcaccgcttatctggtagcgaatgatgattatcatcactttcgtgcgctgttgattcacaccgatttgactgacgaggttctgcacctcaacgctgaaagtgcggccgcgcttggcgtggaacagggcggaacggttcgtctggtcagcttattttccccggagacacgaaaatgacccatgctgcactttttattcaaggggaatggcacaccggcaagggtgagcctttcgcaaaacacgatccgatggatcagcaattattgtggcaagcccgtgcagccgatgagcaggatgttgccaaagcttgtcaggcggcgcgagcggctttcccgatttgggcgaaaacgtcgttagcgcagcgagtggaaattattcagcgttttgccgtactgctggaacagcataaacagcaactggcacgcaccatcagtctggaaaccagcaaacctcattgggaaacgctgacagaaattcaggccatgattggcaaggtgaatatttcactgcaagctcatcaagttcgtaccggcaccagcgaatcgccaatggccgacgcgcgctccgtggtgcgccatcgacctcacggtgtactggcagtgtttggcccgtacaattttcccggccacttacccaatgggcatatagtcccggcattgttggcaggtaatacgctggtgtttaaacctagcgaactgacaccgaaaactgcggaagaaactgtcaaactttggcaacaggctggaattccgccgggcgtactgaatctggttcagggcggacgggataccggcatcgcgctagccggacagaatgatatcgatggcgtgctgtttaccggcagcgccgctaccggctatcagttgcatcgtcaactggctggacagccggagaaaatgctggcgttggagatgggcggtaacaatgcgctgattgtcgaacaaattgatgaccgagatgcggcggtgaatttggcgatccagtctgggtttatttctgccggtcagcgctgtacctgctcgcggcggattttggtaaaacgcggtgcagaaggcgatgctttcttgcaacgttttatcgccgtggcgcagtcgctgcggattggccgttgggatcagcagccgcagccgtttatgggcgcggtgatctcccctcaggcggcggagcgtatgatggatgcgcaggaaactctgatcaaactgggcgggaaagccttgctgactatgaccagaccagacgcgcagggcgcggtgctgacaccgggaattattgatatcaccggcgtgaatgacgtgccggatgaggaatattttggccctttggtctgcattattcgttatgacaatttcgatcgagcgttagagattgccaatcagacccgtttcggtctggccgttgggctggtttctccaaatcgtcgccagtttgagcaactgctgcaggaagcacgggccggtatcgtcaactggaataaaccgttgaccggcgcctccagcgctgcgccgttcggtggtgtgggcgcatcgggtaatcatcgccccagtgcgttttacgctgcggattactgcgcctggccgatggcatcgctggaaagcgagagcctgacgttgccagcgactttatcaccgggcatctcgtttgatgtgaccgatcctctataagccgcggcggagaagccctatggcaggatatgaattaaatctcgatggattggtcgggctaactcatcactatgctggattatctttcggcaatgaagcctcgactcagcataaaaatagcctgtccaatccgaagctggcggctaaacaaggcttgttgaaaatgaaaacgctggcggatctgggttacccgcagggcgtgatgccgccgcaggaacggccattcttacccgctttacggcagctagggttcagcggttctgatgggcaggttttgagtcaggtagtgcgggaagcgcccagactcttgtctgcggtaagttcggcttcttctatgtggactgccaatgctgcaactgtctccccatcggcggatagcgccgacggtcgggtgcattttaccgccgccaatttgaacaataaattccatcgggcaatcgaggcggaaacaacgagcgcgctattgcagcgtattttcaatcatcatcgtcactttgttcatcatcaggcgctgccgggaggggaactgtttggtgatgaaggcgctgccaaccataaccgcctcggcggtgattacgatcggccaggggtgcaagtgttcgtctacggtaggcggggtatgacgaccggttctgccccgagtcgttatccggcgcgacaaacgcttgaagccagtcaggccgtggcgcgattgcatcagctggatcccggtcgcacatttttccttcagcaaaatccagaggttatcgatcgcggtgtctttcataacgatgtcatcgcggtcagcaatcaacaggttcttttttaccatcaacaggcttttatggcgggggacagtgctctggaaccattgcgccgccaaatgggcgaaatggagtatcagctagacgccatacaagtgccgacggagcgagtttcggtggctgatgcggtctctacctacctgtttaacagtcagttactgcgtaagaacaacggaaaaatgcttctggtgattccgcaggagtcgcgggatcacgcgggtgtctggcgctatttatccgagttagtggcgagcggcggggcgattgacgaaatcaaggttttcgatctgcgggaaagtatgcgcaacggcggcggcccggcctgtctgcggctgcgggtcgcgctgaacgaaactgaacttaaggcggtgaatcctcgcgtaatgatgacccccgctctttttgccacgctcaatgattgggtcgatcgtcattatcgcgatcgattgcagctcagtgatttggccgatccgcaattactacaggaagggcatcaggcgctggacgaattgacgcggattctggatttgggatcggtgtaccactttcagcaaaactcatttcatggatgataaggagtcttcatgttggatttgttaactctgactttatctgcgcgtcaaccggtgaacgatcaggggagaacggcacagtttcgctggcattggctgggagaaggcatgctggaactgtgcccgttaggcgaatatcaacaggcggtagtgctgtctgccggtattcacggtaatgaaactgcgccgatcgagctgctaaatcaattggttggcgatttgtttcttggacgcctccagttaaatgttcgcttgctgattttattgggaaatcctgcggcgattcgcgtcgcaaagcgttatctcgaacatgatatcaatcggatgtttggcggccgccatcaggactttcctgaatctatcgaaagagagcgagctcagatagtggaacaggccgtttcccaattttttagcactgaaaaggtgcatcagcggctgcattatgatttacacacggcaattcgtggttcctatcatactcgtttcggcttactgccttatcaggggcgtccgtattcatcagagttatatcgctggctacagcatatcgaactggatgccttagtcatgcatacctctgcagggggaaccttttccaattacaccagtgaatactgggaggcagacagttgtacgctagagctggggaaagcgttaccgtttggacagaacgacttggctcaattcgctggaatcaatcgaggattgcaggggctagttagcggcgcacctttgccggaaagggcgccggatgcgccgatgttgttgtatcgcgtggtgaaatctttgatcaaaaccgatgcaaacttctgtttgcacgtggccgacgaaaccctcaattttgcgcgttttgcctacgggcgattgttaatggagcagtccagtggaaattaccgggtcgaacatccttacgaatggctattgtttcccaatccgcacgttgcccaaggactgcgcgcgggcctgatgctggtgcgcatggacgaaacggagctaccgcaacgctaacagcatatgaatttaaggaatataagaaatataagaaatataaggaaaggagagctgtgtgtcaggtggcaatgaataccgattgccacctgacatacagagtgtattaatgaaattagttaatgcattaaatgttaaaattaatcacgcaggttaatatcactttcggacaggcaggttcagcactctgtaatagtaatgtcataataatacctgctagattaaaaccagtgtttaatactgcttaaattctcattattagcataatcatcacatcaaataatgcatgagtggcacgttgttattgatgattttattaactgcttaattaaccatgcgatttataaagttattatttctctcaattaacgctttcctattgggattggctttaggtgaatcattcatttatttttgcattgcttcaaagaacagaaataattttgctgatctgaatgtttacaatagcagggcgcaatagcctcaaatttttcatcatgttgaccatgccgcataaaaaagaaacaaaaagaaacacttgtgcactattttggtgcggtcgcactcttttggatatccgtgtttgcattaaattcattaataatcagtgtattataaaagttcctcaaaacacattttgttacaattaataaactgtttatgacgatatttctgcaatttttccattttatcttttttcgcttaatgctaatgtctcttggctttacatttatttgtcactataaaaaattaaaacttaaccactaggccgctcaaatatatttgatggcgatgagttaaatttatataaaattcaaggaaaataatgatgaaacgcagtgttctggccctggccgtctccttaagcttgatcccatcgctgtctaacgcagctgaaatctataataaagatggtaataaacttgacctgtatggtcgtgtggctgcgaaacatctgttcagcaaagataaaggaagcgacggtgacttcacttacgtccgtttaggttttaaaggcgaaactcaaattaatagccaactgaccggttacggtcagtgggaatataacattcaggctaacaacgctgaatctcaaggtgataaaggcaataaaacccgtctgggctttgccggtctgaaatttgctgaattcggttcattcgattacggtcgtaactacggcgtagtgtatgacacgctggcgtataccgatatgctccctgagttcggcggtgattccatgtccttcaccgacaacaacatgacaggccgttctaccggtttagccacttaccgtaacagcaatttcttcggtctggttgaaggcttgaacgttgccgttcagtaccaaggtaaaaatgacgaaacgctggttggcgcgaacaatggccgtgcaattcagaaagctaacggcgacggttttggtctgtccgttgactatcaggatatcggtggttcaggtatcggcgctgcggcatcttactcttcttccaaccgtactttaggtcaaaaaactctggctaacagcgcaaccggtgataaagctcaggcatgggcaaccgcgttgaaatacgatgctaacaaggtttacatcgctgcgatgtacggtgaaactcgtaatatgacgccatacggcagcgtgatcgcaaccaaaacccaaaacgtggaattggtagcacagtatcagttcgaaaacggcatccgtccttctttgggttacgtacagtctaaaggcaaggatctggttggcgttgctggcggcgatgcggatctgttgaaatatgttgatatcggtgtgacttactacatcaacaaaaacctgtacacctacgttgactaccaaatcaaccagctgaacgatgacaacaaactgggtctgggcaccgacgacgtagtcgcggcagcgttggtttaccgtttctaagttgtcaaagcagtcattattacccttttctgtgtcggaaattggtgaaagttaagaagcgggggcaactccgcttttttattgaaagataaaaaagccacctttgatggggtggctttttttttgtttagcgctcgaagaaatgtttagtgactaccgctttcctgctggcgcccccacagaatcatgctgcctaccagttgtttcagtaatccctgtaatgcctcggctttacctacgttgaattcataaggctcggtttcggacatgtaattgagttgagccagttccaactgcactgcgtgttgttgcaactgcggttgaccataggctcgggtgatatatccacctttaaatctaccattcaatatatgcgtgaaagtcgtttgctgctgacagcaggcaatcaaacgttcgcttaaactgctggcgcagctctgaccgtcgttggttccccagttcagatcaggtagctggccttcaaacaggcgaggaataaccgaagcaatagaatgtgcgtctaacagcagagcatagccaaaccgagcttttagtcgatccagctcttgctgtaactgctggtgataaggctgccaaatagcttcaagatagccttggcgttcgctgtctgagggtatttgttccggttcaaaacaagggcggccatcgaacaaggtctcgggaaacagaccggtagttgccgtggtatacagtggttgatcgtcggatggacggttgagatctatcaccagccgtgaataattgccagccaacagactggcacccatatctttagcaaatgaataaagacgtggaatatgccagtcagtatcagatagcgggcgagccgcatcgctaagcccggcctcaaccgctggcgtcaggcgagttcccgcatggggaatactgattaataaaggtaattcaccggcgtgaaagctgatgggatcggcgatgatcatgggcgaacctctcctcgatagaccacggtggcagggagctgtccgcccagccagtaagataattcggctggacgagataacggccagtgtacccagttggcgagtttgccgacttccagagttccctgtgtttcctgaacgcccagcgcctgcgcgccgtggcaggtcacgccagctagcgcttcttccggcgtcatgcgaaataacgtacaggccatgtttaacatcaggcgtaatgacagcgccggagaggtgccggggttagcgtcgctggctaacgccataggcacgcgatagtgacggaaaagcgctaccggaggacactgggtttctcgcagcatgtaataggctccgggcagcaacaccgcgacagtgcccgatgcggccattgcctgtgcgtcttgctcggtggcgtattccagatgatcggcagacagagcgtgatgccgcgctgccagcgtgctgccacctaatgaggaaagctgctccgcatggagtttgatcggtaaacccgccgtttttgccgcatggaaaactcgctctacctgagtgggtgaaaacgctaaatgttcgcaaaaagcatcaaccgcgtcggccagcccggcttcggcaacctgcggaataatggtattacacaccagatcgatataatcgtcggctcgattagcatattccgacggcagagcgtgggcagccagacaggtggtttttacctcgaccggcagcatttcgccaagccggcgagcgacccgcagcattttcagctcgctttgcaaactcagaccgtagccggatttgatttccagacaggtaacgccttcggccagcagcggtttaatgcgaaacaacgcctgttccagcagttcatcttcgctggtttgtcgggttgcatttaccgtggaaataatcccaccgccttgagcggcgatctcggcataactcacgccgtttaagcgttgttcgaattcgctgctgcggtcgccgccaaaaaccagatgtgtatggcaatcaattaagccgggagtaatgattccgccgggaaaagtcatttcccgcgaggctctcacggcaggcaaagcggcgcgcgtgccaatccagataattttcccatcatgaacggcaatcacaccgtcgctaatagtgtgatagtggccgccgcgcatagtgacgatatcggctccagaccacaagctgtcgcagtaaattacagacgccatctttatcctccgccccgcggggcgatacagttgtatatacaatcaaagacaacctagcctataaatccaaggtcagcaaccggcaacatgcagcaatttgcgctatcacacctttaatttgttatcaggatgttagggttccctgtggtgtaaaacgaccaaatagttgatagcgggaaccggggtacagcagttgagcggaagtgactacggctttgccgaaccaggtacgacggcgaatcaataaacatggctcattttcatttaacgccagtaacttacgttctaccggccccggcatgacggcctcgacaatatgctcgccttcggtcaatggcgcggcctgcgtcagatagctgtagggtgtgatgcggctaaaatcttgctgcatataatcgggagcggtcagcgggttgacgcagcgattttctacctgcaccggaatatcgttctcaaagtgaacaatctgggagtagaacagctgctgtccggccagaatgcccaaggcgattgcttcttcctccgtagcgggacgagcttccagcagtagaattttgctgctgtggcgatgcccgcgcgcggcaatttcatcagcaatattgtgtacggccagcaatgcactgtgtgccttggcttcggccacgaaggtgcccacgccttgcattcgaaccagaaaaccctcactggtgagttcccgtaacgcgcggttgatggtcatgcggctaacgcctaattccgccactaattcactttctgagggaacgcgctgatggggttgccaagcgccagaacggatttgccgaatgatggcctgtttaaccctcagataaataggggcaggagcgtcatccataacgctggtgagttgtaataggcactgttgttcagccacggcgttaacctcgtcaaagaaataataataagataagtctacggttgaatttagcgtatgtatatgtatatacaagtaggcgaattaatttattgacgcgactgtgtctcggcgcgtttgagtgtcatcacaaccttgggattcactatgcctgcatattttgccaaacgcgcttttttacccgacggatgggccacggatgttcgtttggaggtcgacgcacaggggcatatttcgcaaattatcaccggtggacgcgacgctggctgcctgctgctaggcgggccaatcctgcccggtatgcctaatcttcattcccacgcttttcagcgcatgatgtcggggctggctgaaattgccggagatccgcaggatagcttctggacatggcgcgatttaatgtaccgattagtccagcgtctgacccctgagcaggtcggtattattgcccgtcagctgtacattgagatgctgaagggcggttacactcaggtggctgagttccattatttgcaccatgccccggatggtaaaccttacgcagatagcggggagatgaccgggcaactcagtcaggctgcggaacaagccgggattggcatgacgctgttacctgtgttgtatcgctacgccggatttggcgggcagcccgcgcagcccggtcaaaggcgctttattcaggatgtagagagttatttgcagcaacagcagaaaattgcccaacagatacggcatcaaccactacaaaatcaagggttatgttttcattcgctgcgagcggtagagttggagcaaatgcagcaaatactggccgtgtcggataaacagttgccggtgcatattcatatcgctgagcagcaaaaagaggtgaatgactgtctggcatggagcggtcaacgacccgtggcttggttatataatcatttaccggtagatagccgctggtgtctggtgcatgccactcatctggataatgacgaattatccgcgctggctgccagtcatgcagtagcggggctttgcccaaccacagaggccaatctgggcgacggtattttcccgggggttgaatacattcaacatcatgggcgctggggaattggttccgatagtcacgtttcactcaatgtggtggaagaactgcgctggctggaatatgggcagcggctacgagatcagcggcgtaatcgcttgaccagccctgagcaaccggcggtggctgatttgctgtatagccaggcgttatccggcggtgcgcaggcctgcggtacccaaattggagcattggcggtcggctatcgagccgattggttggtgttggacggtgacgatccttacattgccggcacaccttcatcgtcgttactgaatcgctggctttttgccggtgataaatcgcagatccgcgatgtgtacgtaggtggtaagccggtgattattggcggtttccatccgttacagcagctgagcgctcaggcatttttggcggtgctgaaagactgcctgcgggaggctttttaatgagtctgacattttttgattatgccagtttacccgtgagtcgctggcgcaatggcgggggagaaacccgtgaaattgcctgctggccggtaggtggcgaggattttggctggcgagccagcattgcgaccattgaacaaaacgggccgttctccacctttcctgaggttgaacgttcgataaccttattggcgggtgacggagtcaggttatttagcgcagagggtcatattgatcacgaactcgctcaatctttgcagccattctcgttcccgggggatattgcgctggaggcgacattgctcggaggtaacagtcaggattttaatatcatgacgcgaagaggctgctggcgcgcggatgtctgcatcatttctggtgcgcagccattgcccgtcagtcgtgccggtgtggtgtatgtggttcgcggtgattggcagattcaacacgaggaaagccgccggttatctcatcaacagggttgttggtggacgccaatgattagagggggacaattgcgtcccctggtcgcgaatagccagctaatttgggttgatttattatccgcagtttagtttgataatcaacgggtatgttttttgaatgatatttacacgcaccaataaaggggggctccctttgttgggcaatgatgatttatgttattaacatgaagagatttaatatttcatgtgtttatcggtatctaataatataaagaaattccgatgacgtttttcattgtgcatttttatatctacattttttaatcttcgatggtgtcatttaatgtctgtttagtaggggagttttcattttgattgatgaaattgacagctatttactcgcggcttaataagattaataacgggcgatgtgttcgccatattagctcactagcgagtgttagtgttttaggtgtttgctttttttattatttaatatctttcagtgggatagcggagtcggtttgttaactgtaattgattctctatcaggcgttccctgatgtcagtgacgacttttcccgacggttaaatagatataaatacctagttattaataatgaattatttatggataatgttttttattagaattaccatccttttatttttatggctaagaaatggttaacgtccagtacatgataattaatatttgtttttttatgttcaggtgatatgttgatatgtaacgcttcaattgtttgttgggtcatgatgagattttcttgaagtttactttcgtttttttgtttgtcgaaaatctctaaaactattgtgaagtataatcagcattttaattttttgtaataagtccatccgtgtaatggcgcaccaggggagtcgctttagatatgtttttttaactattaacttttcctattattgctattgcacttacggatattcatcttgtgatttcaaatcatcaccacatggttgggggaatataccagacgcttaccgtttatacggtgtcattttagctgtccagcactgagggaaaattgatttatctggcgtaactaggggcgtcgttaacggagagggcgcaatgaaccaatcgggatgatacaaatattcgcccagttaatgaatgaacaataaaggatttttaatcagagggaatcatatggcatcagatgacactgcggcggtattgctttctcggttgcgagctgcggggctcgtgctgtgggaggaagatggagagttgcactatcgggcacctgaaggttcactgacgccagcggatttgaaatcgttacgagcagccaagccattgttattaaaccagttgttggcagaacgggataaattcattctgcttgaaaataccgctgagcgttaccagccttttcctctgacagatgtgcaggccaattatcttttagggcgtgaaaatgtttatggctacggcggcattgggtgccacgtctatctggaggtcacctatccagatttagttgctacaagaacggaaaacgtttggaatcagctcattgcgcggcatgatatgctgcgagtcgtgatggaagccagcgacagtcagcggattttatctaaggttcccttttttaccattccctgtggggatatgaggaacctcacgagcgcgcaagcgcaaaccgcattggatcgaatacgagctgaactcagccataagaaatacgatccgcaacagtggccactgtttgaaataagaatcagccgaactgctgaatacagcgtattacatttgtcggtggatttattaatggccgattggtccagtatttgccttcttttagctgaatttgaaggactgtatgcccaacctgacaaagccttagatccgatagatgtcactttccgggattatttactagcagagcggaagttgcgcggtagcccaacgtacagtcgcgatcggcaatattggttgcaaagcttggctaatttcccctctgcccctgagttgccgcgcgccgaacatcttcctcaacctgagaatgcccgttttcggcggcgtcatctgaggcttgataatgaggactggctggatttaaagcagcatgcaacggcacacgggttaagtcctacctccattatattaaccgctttctctgcggttattgcgcgttggagtctgaacaaaaagttttgcctgagcttaacggtgctaaatcgtttggctgcctatccgcaaatagagcaggtcgttggaaattttacatccgtcagcctatttcccgttgactggcagtcagatagttcttttgcgcaacaggccgccgctatcagcgcacagctttttgctaatctggatcatcgtctattttcaggcattgaggtgttgcgggagttggttaggcagaaagggcgaggggccgcgctcatgccggttgtattcaccagcgcaattgggctaagggattataactctttgctgagtagcgatggtcgtttggatgggcgcggtatcacgcaggcacctcaggtatttattgattgccaagcggcagatgacgcgcacggattacagattaactgggatatccgtgagggaatatttcctatgggaatggcggatgacatgtttgacgtcttcaccgagttgttgcttgggctcgttgattccgttggtctctggcggcaaaaatatcagctaccgcttccggcatggcagcgaaaagaacggcaaaaagccaacagtaccatgatgaaaatcacctcgaagctgttgcatcaggccatatttcagcaggctgaacgaacgccgggagccgcagctgttatcgattcacaacaatcagttagctatggcgaattggctgaacgagccagggcggtggcgaatcgtttgcaactgttaggatgtcgtagcggtgaatgcgttgcggtggtgatgaataaaggtgcggaacagatatcggcgttattaggcattttttccgtgggtgctgtttatgtcccaattgatgtagggcaaccggaagtacgccgttttttcatccttaaagatgccggatgcaggctggtattgaccacgtcagagatgaccatgcgttggcctgcagaattgaaacgggtagatattgatcgtcttaaatctcagtgtcatgacatcatggttccgacaataacgtcagaatcgccagcttatgtcatttatacatcaggctcctcggggcaacccaagggcgtaacggtatctcatcgttccgcgctaaataccatattggatattaaccgcaagtttaaagtttcctctcaggatcgagtgttgggcttggctcatttggattttgacctctcgatttatgatgcactcggcctgctttctgttggaggctccttggtttatccgcgatctcatcgtgcatccgcatctgacccggctcattgggttgaattgatgctcaaacatagcatcacgctatggaatacggttccagcaatgatccaaatgctggagacttatttaaccagtatgccaccgattcgtatgccagcttggcgtttggcattagtttccggcgactgggtgcggcctggtttacctgacgccctaaaggctcggttcccacagcttcaactggttgtattgggtggggcgacggaagccgcgatttggtcaaactatcattgttatcaaggcgctcaaccggggtggcgcagtattccgtacggttttcctttagccaatcagagattgcacgttctggatgagaacacgcatgattgcccggtttggagtaaaggtgagatttatatcggtggtgacggggtagcgataggctatataggggatgaattcacaacatcccagcgctttataacccataaggaaacacattctcggttgtttcgcagtggcgactttgggcgctatcttccaggaggcgaaattgagtttctggggcgtgaagactgccaaaccaaaatcaacggacaacgcattgagctgggtgaaattgaatcggtactgtgtcagcatccaggcgtagccgccgctggggtggcgatcagcgagtttgaaggtcatatttcactctttgccgcagtagaaacacgccaatccaccgttcagcctgatccgataccaatacactttaaccttgagcgacgaaataggttggagtaccgcactaaacatatcttatatgaatacaccgcttctcaagttgttgctgcgttagagtcactcaacgaggctatgttggactcaatgcgttcggctctattacagttagggctatttgcgctaaatgacagggaaaagacagaacaatggataggtgatagtgcgatctcccccgatttctattggctcatagaacgatggtttgcggtgctattaactgaaaaatggttactaaaaaactctgatggttccgtcatgctggctaaccgaataaatcaaaatgaggggcatcatcgctggcgaaaagctgaatgtttatggaataacgttctggccaactcggagtttcttggctatctgaaacgttgtgctgacagcttaccggcgctattgaaggggacgctggatgccaaaaacctgttgctaccacagggcaatatggctgtcgttcaggcattgtattgcgaaaatatgatggcgcagtatctcaatgatacggtgcgtgatctaatcggcaatattgcgtcagatcgtttatctaatcgacgtttacgaatacttgaggtcggcgcaggaagtggttcgatgactcaggcagtattatcgatttttcgtaactattccgttgattatctgttcaccgacatatccacctttttcctttcggaagcacgcgcaaatttcggtagttttcccgatatctcattcacccgattcgatattgaacaggattaccgcagtcaggggctacagccaaatgggtttgacattgtgctagtcgatggcgtgctgggaaacatcagtcatctggaggaggccttatgccaattgattgagctggcagcgccgggcgcctggctaatcctggctgaatccacgcaggaacatccgtggatactggcttcacaggcttttatgatgaagagcaaaacggggttatcacgttctcaggccgcttatttaaaccgaaacgactggctgacccggcttgctaactataccgacggagaagttatttgcttacccgaatcgtcgcatccgctgttttctttggggcagcatatatttgccgcgcggttaaaaactcagcgtgcttttcttacagtgactcagatcggtgcctttcttcggatgcggcttcctgattatatgattccggagcagtggcaaatagtggataaattaccagtaaccgccaacagtaagctggatcgcaaacaattacgtcggtggcaaatggctgcgtggcaacattatcaacgccagccaacgacatcgggtaatgcgaatctattaaataacaagctggctgaaatgtggagaaatgcgttaggggtgacgcaactgacacaatcgcagaatctgtatgaaatgggggccgattctctgattatggcgcggatggccaggcgaatgcgtgaacagctaaaaggagcgccatatggtgttgatgagatcccttttgatgcattgttatatctaatgctaaatcaaccaaccattgaagcactggcagaatttatttggcattaccccaaaatgtcggcaatgaatattggccatcagcacactgctattggcggagaaaatactaaaccctttcgaagtaacggcatattttatcactatggaggaggtaataccgatgttacccgcatagtctttcacgcgggtttaggttcaatggacagcttccaaccgttattgacggaaatggctgagcaatctgtgggggcggtgatcggtattagcgtcgctgacgataagaaatattgtgctctagatacagaaaggttggttgaacgaattgcggatgattatgccaccttcttacttgctgccggatatcaacagctccaacttttagggtactgtctgggagggctttatgccgttgaagttgcccgacgtttaaaagaccgtggcgttaacatcctggacttggtgttagtcagcagtcatccggtgcgctttgaagtccacgatgaattgatgatcgaaatgttgtttctgcccaatctgagcatctcaatagagcagttagaattaggtgccataaatagcagcctattggttcagggttttatgcaggttattgaagctaataatggggtcatccccatggattcgttaggtacgataggtaacgggggaaacttggatcaggtaggcgaactgtttagaacgttgaacacccaaactcgccgtcaacgatttgaatgttatgttgctgctaaggcacgtcacattgggcaaactatgccggtggagaaggctatggagctttttaccgtctttcgccaaagctttctctctgggcgcttcacgcccacaccttatttgggtgatattcgttttttgctacctcagcaaggttatgatttcgcgccaggaattgatagtcagacattagcgttttggcgtgagatctgtttagggacaatgaaagtaactcatattgaaggaaatcatttcagctgtattgccgcagaaaatgtggcgtcattggcccgtttaattgctttaccatttcagaagtaaatgaggggcattgaatagacccgggtttcgtaggcacttttttgcctcataatggaggctcaatgaaggagtgtttatgtcagccaaaaatttcactgaagaattcaaaattgaagccgtacaacagattagcgagcagggataccctgtttctgaggttgcggcacgactcggtgtttctaccaacagcctttacgcgtggattaagcgttaccaaaaacctgaaccacagcgaaagcaggacgatgcccttcagcacgaagtaaagcgccgcaggcaagaacttaagcgtgtgactgaagagcgagatattttaaaaaaggccgccgcgtactttgcaagaacgtcaggctgaagtacgccttcattaaacaaatgtcctccttttatgctgtacgccggttgtgtctggttcttggcctccattacagcggttattaccagtggctaaagcgacctcaatctttgcgtgccaggcaagatgagcgccaaacaggtcttattaagcagctgtggcttgaaagtggtacggtttatggttatcgaaaaatctggctcgatatgaaagacttgggtgaacgcgctgggcgtaacaggatcgcgcgcctaatgaggcttgcagagttggcttctcaaaccggataccggaaacgacgctattacggcggcggaaagccttcagttgccagccctaattaccttgagcgccagttcattgttcctaccccaaatactcattgggtgagtgacatgacctatataagaacgcatgagggttggttgtatctggccgttgttctcgatctcttctcgcgccgggttatcggctggagtatgggtggacgaatgacagcagagttggtgatggacgccttgttgatggcggtgtggcgacgcaaaccagcggcagaagtactaatccattcggatcagggttctcaatatacgagcgaaagatgtcagcactttatgacagctcacaatttaaaaagcagcatgagtcgtcgtgggaattgccatgataacgcggtggcagaaagttttttccagttgctgaaacgagaacgcataaagaaacggatctataaaaatagagaagaagcaaaggctgatatcttcgattatgtagagatgttttataatgctaaacgtcggcatagtgcctgtgaagatcaaccccctgcagtttatgaaagtgcctggttcatgaggcacgctaccgtctaggaaactggggtctattcaaaatcgctggaaaagctggaaactcaatatatctgccgggtattgcgtattgctgaggaattggtgaagcaattccggttttccagtgtattcaacgctgggttcgttacgctatcgcttaaatccagtacccgacgcttgttgaatcgtgagctaggtaaggtagaagcaaagcgagtactgaaacgctggaagcaccttctgaaacccctgaggcgagatctggctttactgctggatcattacgaaggtacagcattgaccaaccgttacggtaaatgtgttaccaatgcggtagggcagtcattcaatatcacctacaaagatgtggcagcgcgtaaacggaggaagtcagatgtgatgcgccggaagctgctttcgcatatgttacagggcctggaaagtcaggccgtatacgattacgttgccagccataagggcgtttgtgcgctggaacacgatgggtttgtttcttatgaagagatcactgactggtcccatccatatctgttgattgagaaaaagcattaaggggagccactcagtcaattacagcttatcccggttgatagactagacgggacatttagctctttcatgatgtgcatagcaggtgatcctagcctgctttcagcgaggaactgacatttaatttatattttttcaggtggttacattcagtaatccaccacatttcctcattatcagcgtctccgcagcaaaatcgcccacagttgcaccctacagaaattgacactattgttggccgagaggtactggctgtgggctggaaagcgataagagggcgatgaaccacaaaatattcccgttttgttactttgatacgattgctcaaaatgggtggcaacactgagatagttgaaatgactgcatgttacattgttacttttgttaccgttgaaaacatcaagttggagagctaaatggattggccaaaggagtacagcaagacgactcaagcggtaagagatgcggcgtataaacactactatgttgaagcaatcacacggtcggttctgctaccgggacaggagaaaaccgcttatcacgatggactactaacgacggattattaccttttcctgttcaccagcagggagaatccgaagcttacagggtattttacctgtggcttgtatgctgcaaaggggtggttcgagttgaacggacagcgacctgaggaaattccatcatacaacccccttacgggcgagtcctccggtggtagtaaaaagagtggctgcgggattactaaaccgctgaaagctgaatcagacccaagaatgaaacgtcttatcagggtactccagacgttcatttctctgacggacgatgagaaaaggaaaataaaaggcgagtcaaccacactggctgtcctacagaagctcataaaagcgtcaaaagaagcccccagcacgtcaaatattagatcagtaaataccactctgtacaaagcgctcaaggatggccgtcatggtggtgctcgtacattcactcaactagttggttattacgagattcttcttggtgtgactttcaagaagatatctattgatgatttcaatcaggagatcgacgatacccgtaacaagtcagcgacatatccgtatatccctttggcatcattctgaaatgaagtgctacagtcttgtctgctatcggcccatcgatcaagcttagtgggcggaagctctgttaggaacgaggggctggtcacggggtggcgattggaaaatgctgagtgatggatttcgcttccagctcaagcgttaagattgagctagctgaatatagttctttataacgacagcattagttcttaggaaatctaccattttatggcagtattcttaaacacactatgtcaaggaatacgtatgtcaagaatcaccgtcaaagctggagccgactttcttactggattggctcatgcaaaaccagttgccgcattgagtgagctaatttggaatggttttgatgcaaaatctaagcgtgttgagatcgagattaagacggatctggcctttggggggattgaagcaattctgattaaggattatggtaccggaattgctcacaataaagttgtggattactttggtaatctcggtgaatcttggaaaaaagctgagaaggcaaatggagatcgttccctccatggccagtttgggcgggggagattcaaatctctttctcttggtgaacaagttcattggaaaaccgtgttcgaaaaaaatggatcaaaatataaatacacgatttcaaccgatgctaataaaattaacgattttacaatcagtgagccagagttagctgatgatgaagatgtaggtacacaagtagagatttataatgctagtaacactgcggagcttttattaactgaagatgctttagctgatctaatcatggaatttgctcttttccttacagagtatccaagtaggaagttaatattcttaggtaagagtgtctcaccttttgatgcttggtctgacaaacaggactacgatataggcggggtgagtctcccagatggttcattgattaatgcttccttgactattatagaatggaaaaagaaagttcatagggaacttcattattgtgatttgttagggttttctctatacaaagagaaaattgggcagattattcgcgctcctgggtatgattttacactctacgcgaagtgtgattattttaagacgctaagtaataaaaatgaagtatctttaggtgagcttattcctgaggttagagcgattaaagatgctatcattcaacgggcgaagattcattttctcgacaaagcatttcttaataaatccaaaatcgtcgactcttggaaagaacaagaaatttacccatataacgatgacgtactccaaggtccgacggaagtaattgaacgaaaggtgtttgatattcttgcggttaatgttcaaagctatctcaaaagctttgaaagtgctgataggaaaacaaaaaaattcacctttatgctcttatctcaagcgattaaacagaatcccacgtctgttcaaaaaattctaaccgaagtgttaggtttgaagtctaaagagcaagatgaattggctgcgttattggagaggacaaccttatcatcaataattagtgcttctcagattgtgtctaatagagttgattttattaatgggctagataatcttttacatgataaaaatacaaagaaaacattattggaaagagatcagcttcataaaattatagaaaaggaagcttggctttttcgggaggactttttccttgctggttctgaagactggcttgaagatgttttaaaaaaacatatcaagcatcttggcaaaagatatgatgaggatgataacgaacctgttttactcccagatggaaggcaaggccgcgttgacctaatgtttgcaaagtgccgtcaaccgtatgaaggctatacagagtatttagtcgttgaacttaaacggccctctcagaaaattaattacgatgttatcggtcaggtcgaaaaatacgcgttatctgtttctggggatgaacgttttgatcatactaaatcaaaatggactttcatagcagtgtctaactcaatggatgagtatgctgaacgtagggctaatcaacgtgggtggcctaaaggtaaaacattagatgatgctgagttaaatgttgaagtatgggttatgatctgggctgaagtgttgaatgcagcaagagcaaaattaagtttctttagtaagcagttgaatctagaggcatcaagagatgatgcaacatgttatcttgaaaagacacaccgtgaatttattccggttataaatagtactgaagaagtctaattatcctcaccgccttcgggcggttttttgttgttattaaaatgatctacgcattctaataattataaagctacgacgacttcctgtaagtatccctgcaaaatgagtcatcaatttttagagagtttctggcacttcaacttccgcttctggctcgaagtcatgtggtctgccaagtgctagaagcggatgtacatggtcgtgaattagtaatctgcctagcagaaagattaatctgatccacctaacatggatggtgaagtggaccaaacagcaggatattatcataccggtattgcgttaattctgaccaagcatatgagtctattcaataattaaactttcaatgaggataccagagagccttttcttttagcatgatcttttcgcaacaaaacaagttcaagcattgcatagggttcaagagacttttctataatgctctcttcatcgataagttcatcaaaagaagaaggactatttaaggatctaaattcttttaagatggcttgatattgctctgataaaccataatgttgcgttagttctatgaataaatcccgataatatattggcctgttaatcggatatgaatctatgatttcggcgagagtacttaaaacaagaatgtgaaacgtctgaaaaggccatagttgctcatgttttcgattcattttcaggtgccgtgggaaagaggggcctttcttgtctaatgctggtgtaaaaagatgtctcttaatcatccattctttccaaaacgaatagttagccttgaagaatgtgtcgtaaccgtttgagtattcagaagctaacatttcgaccttttcttttatatggcgtagtttgtcgatgttaattaattctagtatatattggttccttcttttctgaatgcttgcctccacagaaggatgtttcaaccatgagcaatgaataacattagacgcatcgtcaaagtaattacatatcgcatatttcccagcgggggttcgcaattcaggaatgcaacttgagtatgaataaccaactctgatcgttctacctccagtaaatatatcgaggacgacacattcatcagactcaaatgtcagcgagactttttgacatgtaacggtgcgggcagtaaatacctctctatttatgttatgcgtcttaccattgtgttcgactactatgtcttggcatatgccggggagatacagcgttttatcctccatagaacgtttaatgagttcgtgtactttagattctctttcagctttggcctgttgcttttcttgttcaatcttttccaggtgcttgagtttatttttctcaagggctgagtggtagatccatttgtagtctacgcggttaacttttagtagagcgatccattcgtcaatgctcctgttttcattcggtggaaaacggtactcaatcgaatcaatctggtggtcgatgtaatattgtctcttctcttcctcacattcatgagtgacccagacttcaattgctacaccaccaatgcctgtctctaggtacacatctgcccagtatttcccgagtttgtactcaagggttgatttactgacatctgtagtaaattcaggaacaaatatatcagtatcatcaagagttaacgaattttggggaagggtaaacttggatatcgataagaagtgttgctgcatcccgatgtgcagctgtgtcatttgacagtctcggctttcttctttggttgtgtgagagaaatggtggcttattaccctaccgttgttctttgctaccagagcgtccccacagttcttacagatgcattcacaccgtttgccgttaggaacggcatcaacgtgaacaattttgtttgtatctttatggagggcatactcaaaaagcatttattcttttagcatcctttctcagatatatcgttgatttatcatcatttgttctattcttgattggaaggcatcttttccaacttatcggtttattcttgcatcattaccctgctttcatcaaggtaatgtaaagatctcgtataaccgagcgctggctgatgtgtaagtatcccgcttaaacggcccattcacttttagagatcttccgacatactgatgatgtcacctgaggagatccttatgcgcaagatccgatttaccgagcaccagatcatcgccgtactgaagtccgtcgaagcgggtaggaccgtcaaagatgtgtgccgcgaggctgctatttccgaagccagctattacaattggaaggcgaaatatggcgggatggaagccgctgatatcaaaaaaatcaaagatctagaagacgagaatcgccgtctgaagcagatgtttgccgacctgagtctggaatgccgtgcgctgaaagacgtcatcgaaaaaaagctttaaaaccagcgataaagcgtgagctcgtcaactatctgaccacgcagtttacgatgagcatacgccaggcatgcaggacgttatcgctgagcaggacggtgtttcgttatcaaccgaatacacgacgtgatgaaccggtgatccagaggctgactgagcggctgaacgctatccccgctatggatttaagaagctttttcaggtgcttcgcaggcagggatacgcctggaaccacaagcgcatacaccggatttactgtctgctaaaactgaattttcgtcgtaaagggaaacaacgcctgccggtgcgtaatccggcgccgctggccacgccggaagccctcaaccaaagctggtcgattgattttatgcacgacgcgctgacatgtggccgacgttttcggaccttcaacgtcgtggatgattttaaccgcgaggctctggctatcgaaattgacctgaatattccggcgcagcgcattgtgcgggtgctggacagaatagcggcaaaccgtggctatccgctgaagatgcggatggataacgggccggaattgatatcactgacgctggcacaatgggctgaagaccatggcgtgatgctggaatttatcaagcccggcaaaccaacacagaacgcgtttatcgaacggtttaaccgaacgtaccggaccgaaatactggatttttatctgttcagaacactgaatgaagcacgggaaataacggagcgctggctgaatgaatacaacagtgagcggcctcatgaatccctgaataatctgatgccggaagaaaatcggctgatggctgagaaaccggaaatctcaaaaagtgtgtggaactaaagctgggatacttacatcgcgagcttcggcaagtttgaccgtcgggtactcacccagcgcaaacatgctggatttaccgttgagtttaaaccgatagcgccatgcctttttgccattgggtttcacttcgaggtagagaccattgaaatgattgagccgatagagtttttctttcggcttggctgtgcggcattgtgtatcagtgagcatagcgagtctttgtctagttcttataccgcgattgtactcatccctataatcatttttcactgcattgtcatgaggttatgtgagacgccatgaaaagaaaaatccacgcaattgcgtggattttatgatgtttgtctgtcttcatgcgatacattgatatcccaagagacaacaaaattaacttagacgttaaacaagaagttcatgacatcgccatctttaacgatatagtccttaccttctgaacgcattttgccggcttctttcgcgccttgctcacctttgtaggtgatgaagtcttcaaaagcgatggtctgagcgcggataaagcctttctcgaaatcggtatggattttacctgcggcctgcggagccgttgcaccgacagggatggtccatgcacgaacttcttttacgcctgcggtgaagtaagtttgcaggttcagcagttcgtaaccggcacggataacgcggttcagacccggttcttcgatacctaactcggccatgaattcagcgcgatcttcgtcttccatctcggcaatatcagattcaacggccgcacatacggcaaccactacggaaccttcagccgcggcaattgcgcgcacttgatccagatacgggttattttcgaagccatcttcatcaacgttggcgatatacatcgttggtttcaatgtcaggaagcttaagtagcggattgctgctttgtcttcagcagtcagagtcttcaatgcacgcaacataccggcattttcgaggtgtggcagacatttttccaacgcttccagctcagctttagcgtctttatcgccgcctttggcttttttctgtacgcgatgaatggcacgctcacaggtgtccaaatcggacagcgccaattcggtattgatggtctcaatatcgtcagccggatcgactttacctgcaacgtggatgatgttgtcgttttcgaaacaacgtactacgtggccaatcgcctcagtttcgcgaatgttggtcaggaactggttgcccaggccttcgcctttggatgcgccctttaccagaccggcaatatcgacgaattccatcgtggttggcagaatacgctgcggtttaacgatttcagctaattggtccagacgcgggtccggcatgggtaccacacccgtgttaggttcaatggtacagaaggggaaattcgctgcttcgatacccgcttgtgtcaacgcgttgaacagggtggatttaccaacgtttggcagaccaacgataccgcatttgaatcccatgtttatatcaccttaaataacttaaaaatcagccaattaggtttaaccagccgatgtaatcaaaatttattccgccattatacacataatgatgatttatctcgatcctactgtttgacgcagtgattttaactgcggtttagcctctgtattttaccggtctatctttatctgggatcccgagagtcggtcataatttgttgttcttgcatataatcttggtttgttgaatttatcgctttcggtgagagtgagaagtaaacaagggaacgccgaataaaaatctacagcattaccggtttgctgccgataaccagtgattacacctgatgccaactatggcgtcttactgttctgatagggtattaaatatggtgatgagcggctttaaatggttgttgctgatcttatttggctctttgctgggcatcactatcacgcattatttaaccagagtggacactgagcgtcctttaacctggttagagcaaatcgataattacggaaaattagtcgagcgtcgctccgataaaagcattaaatatatcggagtgaaaaaggtgatgacttcgccagaaatggacagctatttaatgcgttttagcgcattaaccgatcgctatgaaactaacggtaataaagtcgctaatcagaaaaaatcggatgagtgggataagtttttctgtactgatggattaaagaatattatcggccagtataagaatcgtcgggtcaaagtgatggtgccaggtgcggtttacagcaagaccggagcccgtggcagcgcgacggcctgctatattaattagctaattatttgtttaacatgtttttgagtgagagttttcttagttttttgtgcagtacgatataattttcgcaacattgaatgatttcttcatatttttcttcatcgatcgtgttttctgctgaaatggctcttcggctggacattcggcatttataacacgcggattttaatttatcttttaactcattaaattcggcgctggttttatattccccccaaaaatcgagtgaaatacaggccagccgtatggctttattaaattcacccactttcttcgattgataatcaaagttctttatgctgcggttttcgcaaactctttttaacgctctgatacttctgactgtatcgtaagtcagtttcaaaaactgctcgactagcagagcagtttgctccgtttttttattatcaaaccattttatcgcgactacggccgcagtgattgccataatggcactggaaatcgcaatgacgatatctgaaattgaaccccattccatagtctcaatcctaataaattaaagtgtattggcgttttttataataattatccttgccctcggtgatgaatatgagggcaaggggaatattatgcgttggctttaaatgaatgcaggcgattcatagccttggtcacgtcttcttttaataaaacctcggtacaacgaatagcttcatcgatggcatcatcaattaacgtttgttcgctcgccggtggtttccctaagacaaatccggtcactttacttttatctcccgggtgaccaataccgatgcgcaagcggtaaaaattgggattattacctaatttgctttgaatatcttttaaaccgttatggcccccgttaccgccgcccagctttaatttagccacgccgggcggaatatccagttcatcgtgcgcaactaaaatttcttccggtaaaatacgatagaagctggccatggcagaaaccgctttgccgctgagattcataaaggtagagggaacaagcagtcgaacgtcctgaccggccagatttaaacgggcagtgtagccgtagaatttactctcttctttcagagattgattattacgctcagccagtaaatctacgtaccaggcaccggcgttatggcgggtttgggcatattcagcgcctggatttgccaggccaacgatcaatttaatgctgctcacttcgttattcgctattactcagagatgaaagaaccctagtttacccgtcgccgcgtagaatcacaaaaataagggggagaataaaggtaaaactagcggataaggtaaatactaaccatggttaattattcaacaattaggccaaataatcgcttaatgtaaagatttatagaaatatctttgccagatgtgatcgtctccgcaatacccttatgctttccctgactatactaagtcattaagtacaggtgaacaattcaataggaagagttgtttaaaggaagtgaatgcaggaggtggcatatgaaacgcaaaaccgcaacaacgttaggtaacgcgctgatggggctgggtctggtcactatggttgttggggtaggttactctatcctgaccgaagtttctcaacttggtttaccgcagttcttctcccacggtgcggtcatgagcatttttgtgggggccttgctctggctggtcggggcgagaatcggtggccgggaagaggtggcggatcgctattggtgggttaagcatttcgataaacgctgccgccgtaatgagcgacactcataatattgacgtatttatcgtcagtgaagtgtgatgccagaaaatgttaccgaaaatgcagctgaataattcaaactgagggtagggaattaaatgacagcccaagagtagaaagcccgttgttgcttgcgcttcaacgggtttttctttttctgcgtttaaccgcaaatcactgtcagtgcggcgataagtcagatacaacctatgccagacttgcagcgcctaagcgctgcagagagtgattaatgctcaaacatcgcagagatggactcttcgttgctgatacggcggatggcttcagccagcataccggacagcgtcagagtacgaacgtttttcaacgctttgatttccgcagacagcggaatggtgtcgcaaacaatcacttcatcaataactgaatttctgatgttttccactgcgttaccagagaagatcgggtgtgtcgcgtaagcaaatacgcgtttggcaccacgttcttttaaggcttcagcagctttacacaacgtgccaccggtatcgatcatatcgtcaaccagcacacagtcacggccagcaacgtcgccgatgatatgcatcacctgggaaacgttagcacgcggacggcgtttgtcgataatggccatatcggtgtcattcagcagtttagcaatagctcgtgcacgaacaacaccgccgatatctggtgaaacaacgattgggttttccagattctgctgcaacatatcttccagcaggattgggctaccaaatacgttatcaaccggcacatcaaagaagccttggatctgttcagcatgcaggtccactgtcaatacacggtcaaccccaacacttgagagaaaatcggcaacaactttggcagtgataggcacacgagcagaacgcacacggcgatcctgacgagcgtaaccgaagtaagggataacggcagtaatacgtcctgcggaggcgcgacgcagggcatcaaccatgacaaccaattccatcaggttatcgttcgtgggtgcgcaggtggactggatgatgaaaatatcaccaccgcgtacattttcgttgatttgcacgctcacttcgccgtcgctaaaacgacctacagcggcgtcaccaagactggtgtacaaacggttggcaatacgttgtgctagttccggggtggcgttaccagcaaaaagcttcatatcaggcacgagaagaacctcaggcttgcgtccagagaagatattgtcagccagtagtcaggggcgattcatcctactgattgcaatatacatacgggtatttaaaaccaaaacattgttaacctaaaagagcgttatgagccggcttttaattcagttaagaaggcaacgtgttggcgacgcaggataaaccgtaatgctatggaaaaacctgagttgccacgcaaatcgctgcttatttctcaacttttccagagcgtacaagatgcagtggtgagacgttaacgccacgagccacaaaaccctgtaaccactccggggcaatacttaacacctgacgggccgatgactcggtatcaaattcagcaaatacacaagcgccggtcccggttaggcgcgacggggcgtattgtaacagccatgaaagaacctgttcaacctcgcgaaaacgttttcttgcgatcggttcgcaatcatttgcgtaaggagcggctaaaagtgccgccaaggggcgaactggcgtgtttcttgttaaatccggatcggaaaaaataattggcgttgggatgctaacgccggggtgtgcgaccaaataccagcgctcaatgggctgcgcgggctgcaatttttcgccaattccttcggcgaaggcggcatggccgcgcacaaataccggtacgtcggcacccagttgcaggccaagatcggctaattcttcatcattcaatccgcattgccacaggtgatttaaggcgaccaataccgtcgccgcgttggaggaacctccgcctaaaccgcctcccattggcaggcatttttcgatcgaaatatccgctccgtggggggtatcggaacctgccgtatgttgctgcaataaacgtgctgcccgcacgatcagattttgttcgttttccaccccttcaagcggcgtaagtaaacaaatctggttatcatttctcggtgtgatagtgaggctgtcaccataatcgagaaactgaaatagcgtctgtaattcatggtaaccatcggcgcgttggccggtgatataaaggaataaattcagttttgccggagaaggccaggtgtgaatcatttgacagtccagttatccattttcagtttgatgcgttgctgatcctgctttagctccagacgactcggtaaaactggggtcaccttggtgttatattcttgataatcaacggtccacacttgatttccctgcttataagtcagctgtttcaggcgatatttatcgtcgaggacaaaatcgttggtttcgccgggcaggccgagaatccattggcgcaggctattgataggaatgtccatgccggtaagtttggcaatcatttcttccgggttatcactaacgtagcgtttgccctggttatccgtcagttgagtaacgcccggctgcacgaccagctccatctcggtgctgcccagcggattggtcagcagcagacggtaacgatccgctgaatattgttgccagaagaaacgggcataaaccttctgtttatctgaaatataagcgaaagagccgcgggtctggaactggctgagttgctgcaattgttgctcatgctgttgccactgcggcgaggtggggctcgtcgccgggccagtcgaggtggtggtagtacaggcggctagcatcaggctggctaatggaagcaggcgataaaaagtgaccttgcgcatgggcatatcaatatcaatcctttaaaagcgtggttttcaccagcgaggcatttgggtgctgcaaagttgcagccaaggtgctcacgctaacggtggtaaggcggagcgtcaatatcttgtttatgtcgtgagcaatttacccacgatatccgtgatattaggacggataatgcggtgtgactttaattgctctcgcgcatcaagtagaatgcgactcagacgagaatccatactaagacaagtattactctaagccgttctcatgaccctgctcgcattaggcattaatcacaaaaccgctcctgtctcgttacgtgaacgggtgacattttcacctgactcgatcgaccgggcgcttaatagcttgctccagcaaccgctggtgcagggcggtgtggtgttgtctacgtgcaaccgcaccgaattatacctcagtgtagaacagcaagaaaatctgcatgagcaattggttgactggctgtgtcattaccaccgcctcagccgcgatgaggtcataaaaagcctgtactggcatcatgataatgaggccgtcagccacttaatgcgggtagccagtggtctggattcgctggtgttaggcgagccgcagattctcgggcaggttaaaaaggcgtttgctgaatcccagcggggtcaatccctctctggtgaattggagcgtttgttccaaaaaactttctccgtagccaagcgggtgcgtactgaaaccgatatcggtgccagtgcggtgtcggtggcttttgccgcctgtacgttggcgcggcaaattttcgaatccctttccgaactgaatgtgttgctggtaggcgcaggtgaaaccatcgaattggtggcgcgtcatctgcgtgaacatcaggttaaacatatgattatcgctaaccgcacccgtgagcgggcgcagtctctggcggacgaagtgaacgccgaggtgattaccttgccggaaatcgatgcccgcctggccgacgccgatatcattatcagttcaacggccagcccgctaccgatcatcggtaaaggtatggtcgagcgtgcgctaaaagcgcgccgtaatcagccgatgctgtttgtcgatattgccgtgccgcgggacatcgagcccgaagtcggcaaactggctaacgcctatctgtacagtgtggatgatttacaggcaattattcagcacaatctggcgcagcgtaaggctgcggcggtgcaggctgaatcgatagtacagcaggaaagcatgaattttatggcttggctgcgttcacagggggcggtagaaaccattcgggattaccgttctcaggctgaacagattcgtagtgaaatgaccgccaaagcgctggcggccattgagcagggtgcgaatgtggagcaagtgatcaatgaactggcccacaagctgaccaaccgcctgattcatgctccaaccaaatccctccaacaagcagccagcgatggcgatatggagcggttacaattattacgcgacagccttgggctggatcagcattagtttcctcaattaacaggatttaaaaccgcggatgaagtcttctattgttgccaaactggaagcgttacaagagcgccacgaagaagtggaagcacaccttggcgatgccaatgtgattgccgatcaggagcgttttcgtgcgttatcgcgcgaatatgcccagttgaccgatgtgacccgttgctttaaagagtggcagggcgttcaggacgatctcgaagcggcagaaatgatgctggaagaccctgaaatgcgtgaaatggcgcaggaagaactgaaagaagccaaagcccgtagcgaagagctggaacagcagcttcaggtcttgttattgccgaaagatcccgacgatgagcgcggttgtttcctggaaatccgcgccggaaccggcggcgacgaagcggcgattttcgccggcgatatgttccgtatgtacagccgttacgctgaggctcgtcgttggaagatcgaagtaatgagcgccagcgatggcgagcacggtggctataaagaaattattgccaaagtatccggcgagggcgtttacggtcagctgaaatttgaatccggcggtcatcgcgtccagcgcgtgccagaaaccgaatctcaggggcgtatccatacgtcggcctgtaccgtagcggtgatgccggaaatacctgaagctgaaatgccagaaatcaacgcgggcgatctgcgcatcgatactttccgctcctcgggtgcaggtggccagcacgttaataccaccgattccgctattcgtattacccatattccgaccgggattgtggtggaatgtcaggatgagcgttcacagcataagaacaaagctaaagcgatgtcagtgctgggtgcgcgtattcgcgctgccgaagtgcaaaaacgtcagcaggccgaagcgtctgagcgtcgtaacctgttagggtctggcgatcgttccgaccgtaatcgcacctataacttcccgcaggggcgtgtcaccgatcaccgtatcaacttgacactgtaccgtctggatgaggtgatggaaggcaaactggatatgttaattcagccgattgtgcaggaatatcaggccgatcagctgtccgcactttccgagcaagattgatggattaccaacgctggctggcgcaggctgcggcacgctttcagcacagtgacagtcccaagcgcgatgcggaaattctgttgggtcttgtcaccgggcgtcagcgtacttttttgctggccttcggtgaaaccgaattgaccgaagagcagaaagaacaactggaactattagccgccaggcgagagcagggcgaacctatcgcctatctggtcggtgagcgcgagttttggtcgctgccgttgagcgtgtcttcggccacgttgattcctcgccctgacaccgagtgtctggtggaacaggcgctggtgcgtttacctgaacaaccttgtcgggttctggatttaggcaccggcagcggggcgatagcactggcgttggccagcgagcggccagattgtcaggtcaccggcgtcgatctcaaaccggatgcggtggcgttggcgcgccataacgcggaaaaactgagtctaaacaacgtagagtttctgcaaggcagctggttttcacccctcaccgggcgttttgcgttgatcgccagtaatcctccttatattgatgccaatgatcctcatctggagcagggggatgtgcgctatgaaccacacagcgcgctggtggctgaagatgaaggtctggccgatcttgcggccattatccggcaggcacccgattatctggaaccgaaagggtggttattgctggagcacggatggcaacaggcgacagcggtagagaaactgttgttgcaggccggttttagcacggtggcaacctgtaaagattacggtaacaacgatagggttactttggggcagtggttgccgcagatgacacataattagaatgaaaatggagtgactcatcatgtggattgattatatcgccatgaaatatctacatttggcgacggtggttatcagcattagtctgtttgttttgcggttcttctggaaatgccgcggttcagctatgatagacaaacgttgggtgaagataacgccacatatcaacgacacgttattgtttgtcagcggtattgcactgatatttatcaccgggttttacccgttcagcccgcagggtacctggcttacggaaaaactgttcggcgtgattctctacatcgtgttgggctatgttgctttaggtaaacgcgaccgtagccaaaagacgcgttgtgtggcctttatcctcgcactgggttgtctgtacctgattattaaactggcaacgactaaattacctctgctgatgggatatttatgagtaccattgctgatttcgaattcaacaccgcgcctttgagtgaaggggtgttactggttacccaggaaatccgaccgaactttccaatggctgacgttcgcaaccaactgcaacagttggttgatgatgcccgcgcggcgatgcccagtgacctcaatcaagatcagcaattggaagtgcttattgatttgttctaccgcaagtggaaattcggtggggcgagtggggtttaccggctgtccgatgcgatctggctggataaagttctggcgaaacgtcagggtacaccggtttcattgggcgtcatttttctgcatatcgcccatcaactggatttgccattgatgccagtgatttttcccactcagctcattcttcgtgccgattggctagacgaagaaatgtggctgattaatccgttaaacggggaaacgctgaacgagcatatgctggaagtctggattaaaggtaatttggggctgtctgcggaactggaagatgaagatctggaagaagcggaacataccctgattattcgtaagatgttggatacgctgaaagcggcgttaatggaagagaaacaaatggagctggcgctgcgtgccagcgaagcggtgctggcgttcgatcccgatgatccctacgagatccgcgatcggggtttgatttacgctcagctggactgcaatcatattgccatctctgatttaagctattttgtcgaacagtgcccggaagatcctatcgctgaaatgataaaaatgcagattcactccattgagcagcagcgtattactctgcattaacataatttgatagggcgctgaggcgtcgtgatttattccgatttaccatcattaaaggcataagcatgaaacaaaaagtggttagcattggcgatatcaaggtagcgaacgacctaccctttgtgctgtttggtggcatgaacgtgctggagtctcgcgatctggcgatgcgcatctgcgagcattacgtcaccgtgactcaaaaactcggtattccttacgtattcaaagcctcgtttgacaaagccaaccgttcttcgattcattcttaccgcgggccgggtctggaagaaggcatgaaaatcttccaggaactgaagcaacagttcggcgtgaaggtcatcaccgacgtgcatgaaatcagtcagtgccagcctgtcgctgaagtggtagacgtgattcagttacctgcgttcctggcgcgccagaccgatctggtggaagccatggcgaaaaccggtgccgtgatcaacgtgaaaaaaccgcagtttgtcagcccaggtcagatggggaacattgtcgacaaattcaaagaagccggtaatgatcaggttatcctgtgcgatcgcggcagtaacttcggttatgacaatctggttgttgatatgttaggtatcaatgtgatggtgaactctaccggcggtcatccggttatcttcgacgtcactcactccctgcagtgtcgcgatccgtttggcgccgcgtccggcggtcgtcgtgcgcaggtcgccgaactagcgcgtgccggtatggctgtgggtctggctggcctgtttatcgaagctcatccagagcctgacagcgcgaaatgtgacggtccttccgcactgccgttggataaactggagccgttcctggtgcagatgaaagccatcgacgatctggtgaaaagcttcccagagctggataccagcaaataagctgagttatttcgcgcactaaagcgatacaaaagggcagcgtggtggataactatgctgccctttctgttgtgaccaattcggttttaacgttgtttcagcgctgcgagcgcctcgggtagagagccgtagaagctcagcttgcctggaatcggcttcactctagcccgcgccagcgttttcaatggctggaacggcgtatcggtaattatcagctcccggccttctggtagggcttccacaaagcgcaggaaggcgttcaaaccgccagcatccagcaccggaactgcgtcccactgtaagacaatggttcgtcgattctcgctcatttctagcaactcattgaaaatacgctcagcagcggcgaaaaacagcgggccgttgactcgtaaaatcagcgtttgattatcctgagcgccggacaacgggctgaggcgagtcatacgggcaatgcggcgcataaacagcagggaagccagcacgataccaacggtgatagcgataaccatatcgaatagcaccgtcaggctcatacacagcagcatgacgataatgtcgtcttttggcgcccgccgcagtaaatctaccactttgtgcgcttcgctcatgttccacgccacgatcagcagcagggaggccattgccgccagcggtagataagacagcattggcgccaatatcaataacgccagcagcaccagcagggcgtgtaccaccgcagaaatcggggaagtcgctcccgcgcgcacgttggcggctgagcgagcgatggccgctgttgccgtgattccgccgaagaatggcgcaatcatatttcccaggccttggcccaccagctcgctgtttggacggtgtttctggccggtcatcccgtccagcacgacagcgcatagcagcgactcaatggcaccgagcatcgccatggtgaaggcggcgggtagcagagcggataccgtggcccagctcagagtaaactcttgcccatgagcggccggcaggttccacggcagtacgaactgcggcagaatcggtgggattccttgtccgtaggtaccatcggccagcatatagctgaactttgaaccaatggttgccacttgctggtcgaacagagacaaaacccacatgacagcggtgcctgccactagcgcaggtaagtgacccggtaacttaatcccaagcctcggccagaaaatcaagaccagcagcgtcacgctgccgattaaggtatcgctgaaattaaggctcggaagcgcctgcaccagcgctgaaactttactcatataattttccggcacgacctccatctgtagaccaaaaaagtcttttacctgcatggtggcaatggtgatggcaatcccggaagtaaatccgagcgttaccgatagcggaatatattcaatcaatcgtcccagccgtgctaatcccatgcagagtaaaaacagaccagacatcagcgtggctagcaataatcccgcgaggccgaactgctgtgagaccgggaataagatcaccacaaaagcggcggtagggccggagacgctgtaacgcgaaccgccgctgactgcaatgacaataccggcaatagcggaggtatacaggccatattgcggaggtacgccgctggcaatagccaaggccatcgctaaaggaatggcaataatcccgacggtgatgccggcaattatgtctttaataaatcgttgaagtgtataggtttctcgccagcaagcttcaataagcgcgctgaacggcctaatgccgttaattccgtgcgttttcatctaaggtgcaaaccaaataaggaaaagacaaaataaatggcgggccaataggggtccgtctcgagtagtgaatatcaacgatacgccaaatgtggggcagagatctagatgtatatcaatctctgatcggaataaggataacagggggttttaaaatgtccttataagcgtaaaaagcacgtcagataacggattaaagcatcgatatttattcattttatgaacttttatcagttatagatgaatatttattactaatgagtaaaagagaataataatgattactttgcactcaatatttggggggcgtgggtggcgtaaaaaacgctgggtaatgtggcaggaaagtgtaagagagcagcaataatgaaaatttccctgtggaattgctttacgtagctaagatttaaatgagaagcccttgaggtaatctatattatgctggcatgattaggttataacgagggcagaaagcaatattatttgaagacgacgggtcgcgctgatggctataggtaaagtgaacataatgatgacaatacagcataagtttcattttccgtgagtttcaccacaactctctcatcgctgtttaacgatgctagtgtcacttacgcatcgctatctatcagctatttcgctttgagtaaaaatacgccgttttcctatgacggtgaaagatggaaacgtttgctgtttggtctggtttccggcctgatatcgctgtatttgaatcaggacaaattcattatcatcaacagcttcttttatagttttgaaatattaccgatcattttggcgacattttacggcggctggctcagtggtttagtggctttagccattaacattatttttaccggtctgtttacgctggataatatactgattgtcttaatcatatttccgctgctgttatccaaagtgtgggaaagaaagagcaatcgggttttctatctcactatcgcagttattgccgtttaccgtatctgcgtcggcgcgacttttctcaactatggacatttgtggccgtctacattgatttatctggcgtcatctgctttgtgtctggctatttgttttcacgcattgaattttaaagaacgccatattcatgcttattttgctatgaaagagcgagcgaacgtcgataatcttacccgcttaaataaccgcgctagcgttgatttccacttaaagcaattaagtacgttaaggcgcgcctgtgggttattaatactggatctggataaatttaaatcggttaacgataattacggtcacggcgcgggagatttgattctttccagtgtgggtgagattttgaagcaatccgtgagaagtctggattttattggccgcttcgggggcgaggaatttatcattattaccgaaagccaccatccggaaaatatgaaagtgatggcggagcgcattcgagaaaatattcaacagctagaagtgacgttaagcgatggacgcaaagtcaggatcactatttctattggcgtttcgctgtatttaccgggaatgtcgatggtgaaggcgataaaaatggcggacgatgcgctgtatcaggctaaacggcagggacgaaatcaggtggtttatagcaaactgatgccattctctccgttgggagatcgcatcaggggcgttggaaagcgacagccgcggcgtaatagcccgttatagccgatgagtactatcaggtactttttggggatggcacaaaagttaaaggccccgactttcgtcggagcctttagctcgaatatggcggtgagagaggggttcgaaccctcgatacacttacgcgtatacacactttccaggcgtgctccttcagccactcagacacctcaccgtgttgttacagcgttaacactgcaacggggcggtactatagggataggggccttgagggtcaagaagaatttacgtgaaaccattcgcttgcttaattcaccgtcaacttgcggaaataccccgcaaatccgcgttatttttgccagagttccgcttgctgtggcgaatctaccatcacaaaatcggcctgaagcgctttcgctaaattataatcagattgcgaattaatacctattaacatcaatttgctcaatgaattgcgtttaaaacaatgagtcactttttgattccacaccatagtcgctgctgattgccctctacccagcgttaaggtttcaaccacagataccggcgcacgtaattcaaaagcatgatattccagtttctgcgcttccattctgtcgtcaacccgacaatcatcagccattagtacattagccagcgttttacgcgtatggctgcgcggtgcaaatgttctgatctctggccccagctctttgaaaaaccgatgcttggttgaataaactcgggttctgcccgccgcgttgctgtccgtaatgaccgccgagatatattgagccacgcgaccaaagtcttttgtatgatcttttatgtcgataaagaattttgtcgtaggaaatttgtttaatacgctggccagcgtggggatttttattcccaaccctctgaatttgtattctccttcagatttaaatttataacccgcatccagcttttggagctcttcaagggttaattcagccacggtaccttctccatcagttgtggcattcagatttttcgaacggaaaagtacgggaatgttatcgctagtgagttggacgctaatccagataatatccgcatgatgttccagtgcgtgttgaatcgctgttacggtgttttccggcaaatccgctgtaccgccgcgatgagcgacgattaacggtgccgcctgagcggggagcaggctgggcaacagtgtgagggaagagagataaaataacgtgcgtaatttcatgagaatacccctgtccatagagatgttgaaacgcatagcattttgtcgccaagcgatgttttggctcagatgttttagcatggcggaattaggggttggcataatcaaatttaacaggttctatctatttcttattcaacagaacggtagcgaaaagtgattaatcagggaaaagcacagggaatggggaagcgtcaggtttggctggttttagataaaaaaaacggcaatcacattcagtgggaaatcgctttccctactgtggattgccgttcttcttgcggaggactaactgcatcatccggtactcaatatggcggtgagggaggggttcgaaccctcgatacgcttgcgcgtatacacactttccaggcgtgctccttcagccactcagacacctcaccgtattgttgtcgccaacgccaaacgttgtcgaccggcgtaatgtagggaaaaccaagctcagcgtcaaccctcttgtgtattgtttatgactgtttagctaaagttgcatcaatttgctgatttcatcggcatttatttccacaaaaccgtcgcgtcgttgtaaatctctcgcagaaaatatttttgtcagacaaatagatgattatttgtacttttgtgcataattaggcgattaattcgcacaattagtgcttaattatgaggttaacgggctttgttactggagttatagtcaaaaatgtcgctaaataatcggcttgatgggattgaaataccgaacgaaagtacctctgcctgcgcggctatctgagcaaaactacggccagtcgtacttttggtcggaatagtatttttagtcggaagagcacttttagtcgagatagtatctttagtcgaaatagcatctttagtcgaaatagtatctttagtcggattagtattaggggtaaattttggaacagtcagattccgcaccgcagctcagtgatgatctaccgcagccgattccagccggaaccgggactttattcttcatccaaacctttgccacgttaggttttgccgtgctttattccacgctggtgctctatgccaccaagcgtttggggttcagtgagagcaacgccaatgccatcatgggcgtattcggcgcatttaactatgggctgcatttattcggtggttatttgggtgggcgctacctgagcaatcgaaatctatttgtgctgggcatggtactacaggttattggttgctggctgatcgcggtttatggcctgtggggactgtattgggggctggcgatgttcctgaccggcagcggcctgaatgtaacctgcctgaatatgatgctgactcagagatttatgccggatgacgatcgccgcgaatcggctttcctgtggaattacgccggcatgaatttgggtttcttcctcggttttgccgttgccggttatttccaactgagtgaaaactatcgagcactgttcctgtttgccactttgggtaacctactggcgattgtgattactttatctcgctggcacatattgagagacaccaatacgccgctacagcaggccggagcaaagcaggccaaatggcgaatgctggtgggtattttggtgctgattgctttggttcccatcattcgtttgttgctgactcacgccggttttagcagctattttgttatcgccatcggcgtcgctgtttttgtgatgctaggcgtagtcacggctcgccatcatcctcacgtcgagcgccgtcgtatggtggcctacatgttgctggccgcaggctcattggtcttttgggcgttgtaccagttggctccgatggggctgatgttgtttgctgaacataatatcgatttgaacgtttacggctggcgcgtggctccgcaatggattcagaacatcaatacattggtgattgtgatcggtgggccactgatggcgctgtggtttagtcgcttgcgtaaacgcggtttctctattgatgttcctcttcaattttctggtgcgcttttgtgcatggggatgggcatgctggttctgccgctgggaattcaactggcgggaggcgacgggctggtggcgtttaaatggattgcgctgagttatgtactgcaaagtacgggggaattgctgatttcaccgatcggatacgccatgatcggcaaactggctccgccgcgctatcagggcgtaatgatgggatgctggatgatggtgaccggcgtggcatcagttttggcgggctatgtctctggcatgatgccgactaatagcggcagcacgccgatagaaaccaatccgggctacagccatattttcaacatgctgggctggggttctttgctgaccggcgcggtgctaattgtgctgattccgttgttgcgtcgtctgattcaggaagggcaattatctgcgcaaagcaagctgacagcgcaaaaccgttaacccactggcattattcagatttagggcgaaatttctccggtttcgcccttgcatctcaccgctaatcgcggaaatctagggtgacttatgctaggagcctacagatcatgaatattattttttatcacccctttttcgatgcccaactgtggctaacgggcatgaagactcgtttaccgcaggcaaatattcgtcaatggcagcggggtgataaccaaccggcggattatgccctggtatggaatccgcctcacgaaatgctggctaagcgccaacaactgaaaggcctgtttgcgttgggcgcaggcgtggatgccattttggatcacgagcgccgtcaccccgggactttgcctgccggagtgccgttggtgcgactggaagataccggcatggcgttgcagatgcaggaatatgcggtgagtagcgtgctgcgttatttccgccggatggatgagtatcagttgcagcaggagcaaaaactgtggctgcctctgccgcctcatcagcatgataatttcgttgtggggatcatgggggcgggcgtgttgggcaaaagcgtggcacaaaagctggcgggttttggctttaacgtgcgttgctggagccgaacgccaaaacacattgacggcattgaaagctatgccggtggtgcgcaactgggcgattttctcaaagggacgcaattgttgatcaacttgttgccgaatacgccggaaactgtgggcattctcaatggttcgctgttctcccaattgaataagcgggcttatgtgatcaatctggctcgcggcgtgcatttgctggagcgggatctgctggcggcgatgagtgaagggcaagttgcggccgctacgctggacgtttttgccgaagaacctctaccgagtatgcatccattctggacgcatccacgagtgaccattacgccgcatattgccgccattactttacctgaagtggcgatggatcaggtggccgagaatatcaagctgattgaagcgggcaagcaaccgcagggtctggtggatgtggcgcgtggttactgattccagcaggcaaaacatgggtttcagctcggctgcgcgggggattcctgctatgcttagcggactatgttttgcctgacaaactgagaataagaacccgcggagtagttatgtatccagttgatttgcatatgcacacagtcgccagcacccacgcttacagtaccctgcatgattacatcgccgaagcgaaacaaaagaatattcagctgtttgcgattaccgatcacggcccagatatggctgatgctccccactattggcactttatgaatatgaaagtgtggccacgcttggttgatggtgtgggtattctacgcggtattgaagcgaatattaaaaatctggacggggatattgattgcaccggcccgatgctggacgcggtggatctggtgatcgccggtttccatgaaccggtctttccgccgcaggacaaagccgctcatacccaggcaatgattgctgcgatggcgcagggcgatgtgcacattatcagccacccgggaaatccgaagtttccggtcgatattcccgccgttgcggcggcggcagcaaaatatcaggtggcgctggagttgaacaattcatcctttactcattcccgtaaaggcagtgaagccaactgccgcgctattgccgaagcggtgcggaatgcggggggctggctggcgctggggtctgattctcacgtggcattttcgctggggatttttgatcactgcgaacgcataattgctgatgtggggttcccagaagatcgcattttgaacgtaagcccgcgccgtttactgaatttcctcgaactgcgaggccgcccggccattgcggaattagccgatatgtgacatcgtcacgcccaatgttagcgcagaaaaatagttaccgtagtaaatggtcagcgtagtaaaagcgtttgctgcgaaaaacatttaccgccgtagacccatagacaaatggattaggacagttttatgaatgatttttcgctggtttgccgggttttgggttcgctgttttatcgtcaaccacaagatccgctgttagcgccgctgtttactctgattgaacaggggaagctggagcaacattggccgctggagcaaagcgatctgctggcgcgtttgcagcaggaatatcagccgcaggcgctggccgatgattatgccgcgttatttaccggcagtgaatgcagcgtttcgccttttgcttctcaatgggaagacgcgcgtccggaagcagagttacgcgctttcttgcaacaacgcggtatgccgttaaacgacgggccggtagatcactttggctctctgctactggccgcctcctggctggaagatcaggcgcaggaagacgaagttcaggcgcagattgctctgtttgatgatttcctgttcccgtggtgcgggcgtttcctcggtaaagtggaagcccatgcggcgaccggtttttaccgcacgctagcgcagttaactcgcgaagcgcttcaggcgatgcgcgatgagctggcggaagaagaagacgagcccgaggcagaataaaccgtaggtttgcctagcctggacgatcaaaaagcccgccgatcggcgggctggtatgattgttcagtaaacgcaggttttagtcagtaaagggtacgattaacatccccggtttaacttccagtcctttagccagttttttcgccatagcttcggttttacttttgtcagcatctaatacataggccggttgttggtcaaaatacgattttagtgactgattcaaatagggttttaacatactcatcgccgaatccattttttctggttggactttataatcggtcacttccatatctttcaggaaaatagcccctttctcgcgatcgaataccggctgcgctttcagcgtcagctgcatatcggcgttctgcgggccgaggatcgaactgattttcacctgcgcattgccggttagcgtcactttacccggctcggcgcgccctatctggctctgtaattggctcagggtaatatgggcatccaccagccccggcacgccaatctgtttctcgtaatgattgtgtttttgcagatactcgttaatttcttgctcggttagcgtgtactgtgtcagtgggttgcagccggcaatggcaccgacaaaaatcagagcggcagcgccccaaagtagctttctcattatgacctcgttgaaccgcaaatttggctaatagtaaccggttagaccttgggttggaatttgtaaccggtttctgccgttgcaacgccattggtggcgttcagaaataaggctggatagtgcgggagcggggagaaactgccaatcggataactctgtgtccgatgatttaattaaccagacccggttttaggcgcgtttattcctgattctcgaaagtgtccatcagcaaaaaagtgcctgcctgtcgttggtaactgtctatttgcggaaccagacgcctgaaatgctcggttttgcagtgggtatccagcgcgacgcgatccggccattgctcgataaaaatgaaatggccgggatctttttggttgatacacaactcataagcgtgacaaagcggctcctgcaaggtttttcctactcattcccggtatagcggcatgactttatcgatatgttcaggatgaacaaaatcttgcgcaatcactttcaacataggaataactcactgtttaagcctggctatccatttgattcggtcacttgtggcaagattagctgccacttaacattgccggttcgatacgccgttgattaaactgccaatataatccagccagcgtaatcaggccgatgattccgagtaggaaccaagggagctgcggcaaagacaggcttttgcctgtgtcgtacatccagccgccaccggtgtagcctagtgcgccacccaatgccaaacctaaacggctaaagcccatatagctacctctggcacgcgcatctgccagcgaggcgctcagggtttcccgcgctggctcggcaataatggaacccaaatagaagaagcagatcagcattaataatgtttgcaaactgtcggttaacccgatagggaacatgctgatgctcataataaacaggccggtcatcagccgttgttccagacgaaaatgcttttcgctccagcgggcgatcggatacagcaacgtcaatgacagcgcggcttcaatggcatacatccattttaccgccgccggagaaccggccacttcgtttacaacgataggcagcatcaacatcacctggaccgccagcatgtaataaccggtgagcgtcaggacataggtcaggaagcgtttgtcgcgaatcactcgcagcatgccttcccgcattggggtgcgcaccgttgaaatacggtaggcggggagcagccaggcgttccacagcgcggccagcacaaaaataaatgcaccaacccaacacaccagatgaaaatcatactggagcagccaactgcccagcagagcgccgatcactgcaccggcgctatcttgcatcatgagaatagagtaaaaacggccacgttcatgagggcgaaccagtttgatcaccaacgcggtgcgcggcggatcgaacaatgtgccgcccagcgcggacaatgcgcaggcgagccacagaatccacggctgatccgcgatggccatcagggcaaaacccgccgcgcgcagcaacatcccaatcacgatcattggttttgcgccaaaacgatcggcaatggcgccgccgaaaatgccaaggccttgttgaataaactgtctcaatcccagtgcggcaccgacaacaaccgccgcccagcctaattgatcgacaaatcggatggatatcaggggaaacaccacgaaaaaccccagcacgactaataagttatcaaacaataagaagtacttacccaagctgcgcgcttgcgataccagagacatgtttcaccgtcagaaaatagaaagagaggaagggtaattattaccctgatagtttgtacccaaattgatggaagcgatagatggtgagttgataatatttttttatcgtcaatatgttagctagcgggcaaattggtaaaaaaaatcgtttttgcgaattgattgcgcaataactcgtcaatagcggttttacccgcgaccattgcaacggttatattaatcgtcacttttaatgttccgcctgaactaaggggagtcgatgtttggctatcattcagtatcaccaaaagtacgcctgacaaccgatcgtatgtcgctgcgtttggttcatgagcgggatgcgtaccggatggcggagtactacgccgagaatcaggcattccttaaaccttgggagcctgtgcgggatcaaagccactgcgtgccttccggttggcaagcgcggctcagcatgattgccgagatgcataaacagggcagcgcctattattttattctgctcgatccggaagagaatgaggtgcgcggcgtcgccaatttcagcaatgtgatgcgcggttcattccacgcctgtttcctcggctattctcttggcgaacgctggcagggacagggcttaatgtttgaagcgctgcaaccgctgattcgctatatgcagcgacaggaaaaaatgcaccgaatcatggctaactatatgccgcataatcgccgcagtggcgatctgttggccagattgggctttgaacgtgaaggttatgcgaaagattatttgctcatcgatggtcagtggcgcgatcacgtgctgacggcattgaccgatactgaatggaaagcaacgcgctgaggttaggatgaaatacagtttaagcccgttagaagcccgtgtagtgggctgtttgctggaaaaacaggtgacaacaccggagcaatatccaatgtctctaaacggtatcgccaccgcctgtaaccagaaaaccaaccgtgagccggtgatggaactgtccgagagcgaagtgcagcaaacgctcgatctgctaacgaaaaaacacgttattcgtagccaaagtctggtgaatagccgggtaatgaaatatgaacaccgattttgcaactcggagttcggtcatctgaagttttcttccgcggaagtcgcgatagtcaccacattattgctacgcggcgcgcaaacgccgggagagttgcgtacccgcaccaatcgtatgcatgaattcagcgacgtgagtgaggtagaggcaacgctggaaagtcttgctacacgtgaagacgggccttttgtggtgcgtttgccgcgcgaaccaggcaagcgagaaagccgctatatgcatctgtttagcggtgaggttgccgccgcctctgcggacgagctggcaagcgagccggtcaacggcgtgctggaaacccgaattgctcaacttgaatatcaggtagctgaattgactcgccgtttggatgaagtcatgacccagttggatgactaataaggtcactatgaaaaaacttcgcgtgggtatggtggggcttggcggtattgcgcaaaaagcctatttaccgattttaagccgtgccgacgactggacgctggcaggcgctttttcgcccagtcaggccaaggctcagccgctgtgtgaccgctacagaataccgtattttccccggttgaatgagctcgcgacggcctgcgacgcgatttttgttcacagcagcaccgccagccattttcaggtgatcggcgaactgctgcgcgctggcgttcacgtctacgtggataaaccactcgctgaaaccgtggaacaatcggaacagttaattgaactagcggaaaaacagggcaaggcgctgatggttggcttcaatcgccgttttgcgccgctgtatcagcaacttaagctggaaatgaatcagccggcttccctgcgcatggaaaaacaccgacaggatagcgttggcccaaacgggctagggtttaccctgctggatgattatctgcacgtgctggataccgtcctgtggctgggaggcgaaaacgccagcctattgggagggcatatcgccactaatgacgcgggtcagatgctgtatgccgaacatcattttcaggctggaaactgcctgattaccagcagtatgcatcgtcgggcgggaacccagcgggaaagtgttcaggcattgacggaagggcattgctaccagatcaccgatatgcggcgctggcagcaggagtctgccggacagatgattgaaactccggcaccgggctggcaaacaacgttagaacagcgcggcttcgtcggcgcggtacgtcattttatcgattccgtcagccatcaaaccccgccgttgatttccggtgaacaggctattagcgctcagcgaagggtggaaaaaatgctggaaaagcgttgagaagcccgcaaggtggcgagatgcagattgttacaacaagaagtggctattagtcggcggatacgtagactattgtcatactaaaaacccgtcatcgggttgagctgacgcctgctaattgcaggcgttgatatttccagcgtaacgaatcagaaaatatatgaatttacttaaatcactggctgcggtcagttcgatgaccatgttctcgcgcgtgttgggctttgcccgggatgccattgtcgcgcgaatttttggtgccggtatggctaccgatgcattttttgtcgcattcaaattacctaatctgttgcgacgcatttttgctgaaggggcgttctcgcaggctttcgtgccgattctggcagaatacaaaagtcagcagggggaagaggcgacccgcacctttgtggcttatgtttccggcctgttaacgctggtattggcagtggtcacggtattggggatgctggcagcgccttgggtgatttacattactgcccctggttttaccgatacgccggataaatttgctctgacttctgcactgttgcgcattactttcccgtatatcctattgatctcactggcctcgctggtgggggcgatactgaatacctggaaccgtttctccattccggcctttgcaccgacgttattgaacgtcagcatgatcggtttcgctttatttgccgcaccgtatttccatccgccgattttagctttggcctgggctgtcgttttgggtggcgtactccaattgggctatcagctgccgcatttgaagaaaatcggtatgctggtgttgcctcgtctggcgctgcgcgacgctggcgtgtggcgggtgatgcgccagatgggacctgcaattttaggggtttccgttagccagatatccctgatcatcaataccatttttgcttcttttctggtgtctggttcggtttcatggatgtattacgccgatcgcctgatggagtttccttccggcgtgttgggtgtggcgttaggcactattttgttgccatcgctggcgaaaagtttctccagcggcaaccacgatgagtattctcgcctgatggattgggggctgcgcctgtgcttcctgctggctattcccagcgcggtcgccttgggtattttggccaagccgctggtggtttccctgttccagtacggtaaattcaacgcttttgatgcggtaatgacccaacgtgcgctggtggcctattcggttggtttaattgggctaattgtggtgaaggtattggcgcccggcttttattctcgtcaaaacattaaaacgccggtgaaaattgccatcgccacgttgatcatgactcaggtgatgaacctgatgtttatcgggccgctgaagcacgctggtttgtctctgtctattggtttgggcgcctgtctgaacgccagcctgctgtactggcagttgcgtaaacagaaaatcttccagcctcagccgggttgggggatatttatgaccaaactgattgtaggcgtggttgcaatgtccgccgtactgattggtatgctgtggttaatgccagcctgggacgtcggcggaatggcctaccgtctgttacgtctgtttgcggtcgtggtggctggcgtggtggcctactttggcgttctggcgctactcggtttcaaactgcgcgactttgcccgccgggttgcctgataactaaatgggcaaaaatgctcatatcatctctatgtaaagcccgattcttctcggggttacgtgaaatagtcacctccaccctgttagcggtacgctgacagggtgtttttttatatcaaatgagatcaatatctcagttttatttcctgcactacaagttcccgccaaaattcttttatattaattatccccattatttcttagaactatgctagcgaggttggtaattaaagctaatatttttcttattcatgccgataagtgtattaagtcggggtttttgaaagatttgatattttataagaatcttctaaatgatgattttcattaggaatgctgtacacattaatttgacttagtgttgaaggataattgatttatttactggtttaataacattctgattgcgtttaagtctgactagacaacagcgatataaccgtttgcgccctgctgaattcagggttcagtcaatttagaatgaaatatatttacatatatttaactcaaggatgagtagggcaggttatttactaaatagcttgggctatttctcataatggaatctatgataaaaagaatcggactctattttctgctcgtcagtagccccgtccaggcggcgactcagcccgctatggggaattttttaccgctaggtgaaagcgaagcgcgccgctctttgcagaacagcgcccgtgaggttaatgagctaatggaacagcgtcgctaccaacagttgcgccaacctaaggcgattgaagaggacgttattcctgctcaggcggcgttgccggaatccgatcgttgtctggcgataaagggcgtttatttacagggaataacccttttaggaatgggtgaactgaataaactgaccgctttaccttcggattgcattaccagcaatgatatcaatcgcctgactcatgaattaacccgtctctatgttaggcagggttatatcaccgctcgcgtgaattttgttccgctgaatgctgacggcgaattgggcatcaatgttattgagggcgtggtagagaaaatagaagggggcgattattgggtgaatagccgattattattccctgatgttgtaggtaagccgctcaaattgtcgcagcttgatcaaggtttagaccaggccaatcgattgcaatccaatcagacgaaattagatattttgccagggaggagcaccggcggttctattattcgtctaaacaatacgcataaaaagccctggttgctcacaggcacgttggataactatggtcagaaaaataccggagagtggttggtccgtactaccgctagcgtagatagcccatttggtttatctgactttgtcagcatgaatatcagcagcacgatcaaagatgaatcgcggcatcataaccgggcttataccttactttattctttgccctacggagcttggacattcagcagttttgccagttattccgaatacctgaattaccagcgcttaccgcttaataccgtgaaactggatggcaatacccagcagtacggcgggcgcgcagattatatgttttatcgcgaccaggagcagatcgatgccctgaacgttcagctgacctataagaacgtgaataactaccttgagtcttcccgtttaggtatcagcagtaccaccctgacggtattggagttgggtgccaatcatttgcaaattcttccgcgcggcgtgctcagcctaaatgccagcgtagaacggggactcagttggtttggcgcggataaagccagttcgcatcggtcggctaactaccctgatgcccaattcaccaaagcgaaaatgtttgccactctcagccagcgttttagcctgtgggagcagccttaccaactcactcacctgttttacggccagtacagtcgcgatcccttgccgggggtcgaatggctaagcctgaccgatcgcagcgcggtgcgcggttttagccgcaataccctttcggcggataacggctggtatctgcaaaatacattatcacggccgatgacgctcggtaatgccagcttgacgccgcgcataggcgttgacgtagggcgtgttcaagcccatcgcgatgccgttggctggcagagcaatatggggctgagtgccggtgtgtccttcaaatattcgcaggcggtggttgatctggatgtgagccgaggatggctgctttccgatcaaaaaagtcccaccgacccgattcaggtgttagctcgcctgagctacagcttttagctgactttccattcgtcagtattgcagtgcttttacctttcaatgaatggaaatatttggagaaacatggatgaaaaaaagtaagttccgcctttccccctcaggaaagcttgccgcgtcgctggcgattatcattacttcgctaaccgcaactcaggcagcagatattatcggtgcgggcgatgccgggcataatccgggcatcagtcaggcggcaaacggtgcggcggtggtgaatatcgtcaccccgaacgcctcgggcctgtctcataaccaatatcaggatttcaacgttaacaaaccgggggcggtgctgaataacgccttgaacgacggacaatctcagttagccggtcagctgaacgctaaccccaacctgaacggacaggccgctaacgtcattttgaacgaggtcattagccgcaacccatcgttattgctgggtaagcaggaaatattcggtatggcggcagattatgtgctggctaacccgaacggtattgcctgtgatggttgcgggttcatcaacaccaatcgctccgctttagtggtgggaaacccgctgcttgaaaaaggagccttaaccggtttcaacactttcggcaatgacaatactttgagcattcgctccggcggattacaggccaacagcgtgttggatctgatcgcgcccaaaattgacagtcgcgggaaagtgattgccacgcagcaaattaacgcgctcagtgggcacaatcaaactgcagccgacggcagtttagtgcgagcggaggatgtcccgaacagtagtctggacagctactatctcggcagtatgcaggcgggtcgcattcgcttggtgaatactactgtgggcagtggcgtaaatctggccggggaattcaccgggttggaaggcatagacgtaagctctcagggcaatttgggcttacaggcagcgaatctgcgcggtggtgatatcggtctacagggtaaaaacatcgatgctcaaggcgtcgtgaaaaacagcagtacgaatcgcgacggcagtgagaattacaacagcacctggagcggccagtacgtcaatgaccgcagtaccacgcaacgattacagcgtacggtattaaccggcaaaaatatcacgctgaacgccagcgatcgtaaccgactgacggcgacagatattcaaggggataatgtcaccctgcaaggtggtgaactgacgttggacgggcagatgctgacccagactcagggtcatacgcacaatcaggataagcttacctggcggcacaatgtcacgacagaaagcgaacagcgtcagcagatcgggacgtcggtcaaagcccgtgagaacgcgactctgaaggccacggctggtgatattcagttgaaaggcagtagcgtggaagcgggtaacaatctggcactcaacgctaccggcgacattcagctgacggggttggtggagcagaagaaatccaccgaaactggctatcgcaaaaatcacacggccagcttactgacgggaaactggcaggaaagcagcgaaagtgaaagtctgaagaaaagccaactacgagcgggcgataatctggggctaacggccggcaacgcggtggtcagtcgcgcaggcaatgtgcaagccggtaaagatttgctggtcacggcggaaaaggtgcggattgacgtgcagaaaaccgccaatagaaaaactcagaaagataataaaacggcctggggcggaattggcggcggtgataataaagacaatgccaatttacaggaaatcagccaggcttcagaactgacggcgggcggtaaacttttggtgtccggtaatcagggcgtcactattaccggtagtaaagtaaaagggacgcagggcggttttgtgcaaacccaacacggcgatttggtgattgataatgccgtgagtaccactaccgataaagtgaatagccgcaccggaaccgtattcaacatcaccaagggttcacaaaagaccaataactccatgcagcagactgtaggcagtgaactgaaatccgatgcggatttaaaactgttcagccagcaggatattaccgtggtaggcagtttggtgaaaagcgcgggcgagctgggcattgacgctctgggtgatgtcaatgtgaaagcagccgaactgcaacacaaaatcgatgaagagaaaaccgctttaagcctgaaaggccacgcggagaaaaccggagataagcaatatcgcgcgggtgttaatctggatcacactcgcgataccgaaaataccgaacgcagtgaaaacaaatcttcaaccctgagcggggggagcgtgacgttagcatcgggtaaagatgtcactttcactggctctcagctggtcgctcatcacggcgatgccaaagtcagcggcaacaatgtcacctttacagcagcagaagatcaaaccaccagtgaaagcagccacgccaaaaccggcggcggtttctattacgtgggcgggatggataaagccggcagtggtattcaggtggggcatgaaagcagcaaaactcacagcgatggcagcaaagcgctggtttctgggactcaggtcagcggagatttggtgattgcggccaagggcgacctgactcatcagggcacccagcaacagattggtgggaaatatcaggttgatgccgataatgtccacaatctggcggctaaaaatagcgataacagcacaaccacaacgttgaaagtgggcgtagatatcggtgtaaacgccgattatagcgccatcactcgcccgttagagcgcgccggtggcaaggttgccagcctggatgctggcggtacgcttaatgatatcggcggaataggtgcgccgaacgttgggattgatgttaacgccagcggtagcagcagtgatgtgcgtaaaaacagcgagcaagcggtagtgaatacggtgaatgccggtgatatttccatcaatgcagggggagcaatccgcgatcagggaacgcaatacaaagctaatcagggcggcgtcaccttggatgcagaaagccatagccacgaagctgcggtgaatcgcgatcagaccgttagtcgtgaaacgaatggcagcgccggcgtgcgggtttacaccacgaccggtagcgatgtggtcgtggatgctaaaggtcagggagggacgactcgcagcgataaaatcaatgagcaagccgttgccggtggcatcagcgcggtagacggtatcacgattcgggttaaagacgacgcgcgctataccggaaccgctctcgacgctggaaaaggtaaagtcaacgtcactgccggtggcgatatagcttttgaacaggcgaccgaccgcgaaaccgaaaatcatagcggcttcaacgtgaaggcttctggcaaaggtggtttcaccgcagatagcaaaagcttcggcggcggtttgggcggtgactatgacaaaggggaaagcaagacgtctcacgctaacgtgagccaattacagggcttgcaaggcgtagaattgaatgccggacaggatttaacgctgcaaggcagtgaaatcggcagcaaagatcggccggtgggcgatgtcacgctgaacgggaataaagttgatttgcaggccgcacagtccagccattgggagaaaagcactaagttctccggcaatctggacgccggtggcagcaaaggggaaaccgataaaaaaaccagcgctggcggtaacttcggctttgccgcagattacgccaaagtcgatcaatcgaccaacgacgctcaaggcggtggtatcactagcagcggcaacctgaatattcaggccaacggtgataatgagcaagccattcacctggaaggtacgcaggtgagcagcaaaaataccgttttgaatgcggataatggtggaattgtgctggaatctgctaaaagcggagagcacaaagataactggaatctgggaggcaaagccaacggtaaactcggccaaagtttcggtaaagatgagcagggcgcggtagacagcgccagcgggaagaaaacccacacggcgggcgtcggcgcgaccttcggtctcgatcgtaaacaggcaggcactcagcaaaatacccagattgcgaccggcgatctgagcttctccagcgatgcggatacggttctggccggcgcgaaagtcaaagcggataaagtggacggcagcgtgggcggcgatttgcgtattgaaagccgcagagacaccgaacaaagtctgaaagttggcgttgacgttggattaagtcataccaacgatccgaacagcagcgtggtttccaaagtctctaaagtcggtacgccacgttacgcggataaagtaaaagaaacgctggaaggcggcgcgaacaaagtcttcgataaagccgaggagaaatataaccaaaccgctcgcggtctggacagcaaacaagataccaccaacggcgtcagcttcagtaaagccgaggataaagtgaccttgccggaaacgctcgccaatgagaaagagggcagcgcgctgtgggataaaggtgcacgtaaagcgggcaatgtggccaaagagagtcttttaggcccggcaggccgtgatgggcactttaaggttaccgccgatgtggtgaaaaacgatgccgttggtgaacaaactgcgctaagtggcaagcagggcgtgaacctgaccgtacaaggtaaaactcagctgatcggcggccagatcggtagccagaaagggcaagttgacctgaacagcggcggtcttgagcaaagtgatatgaatggcaaacgctatcacggcggcggcagcgccgatgtggcagccaccgtaggcagcctgttgagcggcagcaccaaagatattctttctggggattcaccgttcattaaagtggataaagggacgaccgaggttagcgatgctcgcggcgcgattatcagccataaaacggttaaataagcgggagcgataagaggttattctttttagatcaaataaataatagcccacgctaacggagttattcgttaagtgggctattttctcttacatgatcacatgatcaatcgttacatcaccaattttccgcagacaatcaatgcccgcgcaccatcggttttacatccgttctaccgtttcaatacccaaagtatccaaaccttgcttcagcgtcttggcggttagcatcgccagtttcaggcggctttgacggctttcttcgctatcggcgttcagaatctggcagtgctcgtagaagctagagaacaaaccggccacatcgtacagataggcacacataacgtgcggagtgccttcgcgggcgacgttagtaatggtttcttcgaattgaagcaaacgggttgccagtgcggcttcgcggtcttcggtgatgactaacggcagcgtcaggctgctcgcgtctaccacaccagcgcgtttaaacactgaaactacgcgggtataagcatattgcatgtaaggcgcggtattgccgtccaatgccagcatattatcccagtcgaagacgtaatcggtagtccggcttttcgacaggtcggcgtatttcaccgcgccgataccgaccgcatttaccacttcggccagttcatccgcaggcatatccgggtttttctccgcgatcagcttacctgcgcgttcgatagcttcgtccaacagttcagacagcttaacggtgccgccagagcgggttttgaatggtttgccatctttgcccagcatcatgccgaacatatggtgttctaacggcacggattctggaacataaccggctttacgcacgatggtccaggcttgcattaaatgctgatgctgccgggaatcgatgtaatacagcacccggtcggcacccagcgtttcgtaacgatatttggcacaggcgatatctgtggtggtgtaaaggtagccgccatcctttttctggataatgacgcccataggctcgccttctttatttttgtattcatcgaggaatacaacggtagcgccttcgctctcaaccgccagacctttcgcttttagatcggccacaatgcccggcagcattgagttgtacagactttcacccatgacgtcgtctttggtcagagtgacattcagacgatcgtaggaaatctggttttgcgtcatggtgatatccaccaatttacgccacatggcgcggcaatattcatccccgccctgcagttttacgacgtaagcgcgagcgcgagccgcaaattcttcgtcttcatcgtaatttttcttcgcttcgcgatagaaagcttccagatctgacagacccatatcgctggcgttctcattctgcattttttccagataggcgatcagcatcccgaattgggtgccccaatctccgacgtggttagcgcgaatgacattgtgacccaaaaattcaagcgttcgcgcggcggcgtcaccgataatggtggagcgtaggtgacccacatgcatttctttcgctacgtttggcgcagaatagtcgataaccacggtctgaggctcaaccggagcaatccccagttttggcgcagtcagggcaaactcgactttctcggcaacccattggcggtcgaggaagatgttgataaaaccggggccggcgatctcgactttgctggcgataccctcaagatccagcagctcaaccactttttcagccagttgtcggggttgcataccgagttttttggcaacggccatcacgccatttgcttgataatcgccaaattgggcctttgcggactggcgaacttgcgcttcgctgtcgacgggggcacctgctgcaatcagcgcctggctgactttatctgaaagaagagcctgaatattcaccgggttaccttaattacggacatgaggcgcaaaaatgcgccctgttaatatcaacgggtctggcgtcacgcacgcggtttctctacgcgggagggccaaccacaaaactgctgggtttatatcatatttgcccgccgacgtcagcagggggaaagccttccgcttgtgctatctcagcgctatgttcctaacgaacaaaaacagtgcttttatcggttatttcaacagcaatagcggagattcatcgacaaaactctgttgttcgccgctgaaaacggtaaattatggccgattcgctttcccccccgatgaacggagagaaaaccttatgcaagccttggcacacattaccgaattacaggatttggtacaggatttaccccgttttgaacaacagctgacggattttgcgcaacggctcaatttggacctcagccagttcaccgccgaccacatttctctacgctgtcaccaggccgctacagccgatcgctggcgcagcggtttgcttcagtgcggtagcctgatgtcagaaaatcttatcaatggccgccctatctgcctgtttgatttagcgctgccgttgtccgttgggccttggggaattgattgcgtagaattgccttatccgggaaataagcgttatccccatgaaggctgggagcatattgaactggtattggccggcaccccggaaacgctgtactcgcgggcgttgagcctgctaccggcagagtctgacctaccggtaggcgtgaccttcaaattcagttcgccaaaaggggaagccgaacgtttggctaaccccacgctggcggtaagcaacggcgcgattaccattaagttccatccctatacattaaggcaaattattgacagtgagcacaatagttaacgtgtttaggttatttatctcgctcaggattatcacttatggttatcactgtgactgacctctagtcattattttgaattgaatgccatagtaaggctttcggcagtcttgatgagatgacctttgggcttgagtgataagttctgcatccaatctatcagacggcggaatgattgatttacgggtggtgaaatgagctgtagcagatgtgtttgtcaaaaggggagagataatgactaagttagaaatttgttgctatagcgtcgattgcgcgcagaccgctgagcgcgctggagccgatagaattgagttgtgctcaggtcagtctgaaggcggcctgacgccaagtttgggcgcgctgatgcaagcgcgtgccacggtaaccattccggtccacccgatagtccggccgcgcggtggtgatttctgctatagcgagagtgattttgcgatcatgaaaaatgatatcgcacaaattcgggatatggggtttgccggagttgtcgtcggcgtactggatgaagaagggcacattgatttgccgcgaatgcgtgaaatcatggagatcagcggcccgctggcggtcactttccatcgggcatttgatatgtgtctgaatccgatggtggcgttggaacagttaacgcagttgggcgtggcgcggattttgacctccggccaacagcaaaatgccgagttggggttaaccttactgcgcgatctggtgaacgcgacccaggggccgattattatggccggtgccggtgtgcgcttgtcaaatatgcagaaattcttagaaattggcgtcacggaattacacagttccgcaggccgcacacgtccttccaccatgcgttaccgtaaagccggtgtcactatgtgtgcagataacgatgtggatgaatttgctcgctattgcgtggatgaagaagtggtggaggcgatgaaaagcctgttatgtattaccgaaccgctgccacgttccgcctgatagtcctaaataaaaaagccccgacgcgtgatgttcggggctttttttatgccggaagagagccgattgtgattaaggcttacgggcaatcagtaccgctcgcatcggtgccggatagccttcaacggtcttgctgctgtcgttgggatcgaggaattcagccagtgactcgctagtcatccaatcggtacgacgctgctcgtcggtggttgtgagcgccacgtcggcgattctcacatcgacaaaaccgcatttttccagccagcctttcagcgccagcgctgacgggatgaaatacacgttgcgcatttgcgcgtaacgatcgcccggcaccagaacctgctggctatcgccttcgactacgatggtttccagcaccaattcgccgtcgctgactaactgatttttcaactgatataagtgatctaacggtgaacgacggtggtacagcacgcccatagagaaaacggtgtcaaaggccgccagctccggcaattgctcaatgcctagcggcagcagatgggcgcgctgatcgccacccagcagttttcgtaccgcttcgaactgacataaaaacagctgcattgggtcaatgcctacggccaaatgcgcgccttcgccgatcatgcgccacatgtgatagccgctgccgcagccgacatcaagaatcgttcgacctgccagcgggctgatatggggcagaacgcgatcccatttccagtctgatcgccattcggtatcgatatccagcccgtataatgaaaacgggcctttgcgccacggcatcagcgcgcgcagcattttttccatgccctcgcgctgaccggctgacagcggcggggtgatgtccgcgcgcacgccgtctttcaaattcagttcggtaggtgtcaacagcggcagatgctcaacggcgttaaaccaggttttgaacttaccgtgcagggattcacgctgccagcagcttagctgcgccggcagggtttccagccacgggctaagtggccctttggcaatcagtcggtaaaaatcaccgaattcaatcattgggcttctcctgctttcagagcaatcaacgaaccaaaattaaagcactggaaccatacttcggcgtgttcaaaaccggcgcggcgtaaacgcgctttatgggtttccaccgaatcggtcagcataacgttttccaacatgctgcgtttttggctgatttccagctcgctgtagccgttcgcccgtttaaaatcgtggtgcatgttaaacagcagatcgccgacgttggcatcttcaaaactgaatttttccgataacaccagtgcaccaccgggacgcagccccgcgtacacctgattcagcaagcgctggcgattggctggctccaggaattgcagagtgaaattcagcacgaccattgaggcgttttccagtttcacatccagaatatccgcctcgaccacttccaccggggtatcggcgcggaaagcgtctaaatggcgacggcagcgttcaaccatggcaggggaattgtccacggcaatgattttacagccgggaacctgaatattacgacgcatggccaaggttgccgcgcccaaagaacagcccagatcgtaaacctgactatcaggttgtacaaagcgctcagtcaacatgccaatcatcgaaataatattggaataaccgggtaccgaacgctggatcatatcggggaaaacctccgcgacgcgttcgtcgaaagtccaatcacccaatttggcaatgggcgcagaaaacaggctatcccgcggcggttgcgtggattctgtgtgcggctggcttgccggcatagcatcagttgctggtttggtatcgcgatttggcatgacggtcattgagattgctggaaaatgaaggcgcgtattctaacagaaacgaccggtttttgctaaaaccggttaaacctgagtgacaggaaaatttgtccttgataatttaaagggattggtcgcttactcctggttattccgtggctatagcggcctgagtcgctgctatatgggttcggttatcgttgaatatataaccggtggatttaacagcaaccagtgatgtctggtgttattatccgttgcgggaataattcagggatggatgatgagaaagattatctttttaatcggcttagtggtggtggttttgagcagctatgtactgcgctatatgccgctttacctggtattcatgctttttatttgcttgataatttatggcgcaggtatctaccttaaccccagattaacgacctcaaactggcaccttgggcagaaatgtcagatcaatggtgcgacggcggtctctttgagcgtcttatttttaatcttagtgacgtgtagttcaaccatcggctgggcttattatatgtcgaccaagccttggtatcaggaagatagcaacggctatcagacgcatacgctgtccgccactagccggaaaattgcccaggtgcataatgcggtattgaagaaagtcaaacatccagaacgagctgaattcctcggagattatatcagtccctccgaggggttaggagtgatttgcggctacctgaactatcaggatcccgcaggtgaagacgatgattattatcgctatgtttccaatggcacaccatccggcacctttttacagctgcaaaccgaaagtttttccgcggtgtggacccaattctgtttggataaaaactgaaaatagaatcgtggttgaccgcatgaaagcgtgtctgaacagcgggagggaaagaggcggggtaacacgggaaggggaaaaccggataagctaaggtgagaaagctggaacatgaaggcggtgataaaccgcccgaactaactgtggttccgataaaagaacgcataaacagtgaaaccggggattaagttaagctaaaaatctgttcccacggtaaatagtagatattagcgattatcattagtatcaatgaaacataagttgcactcatccctgaacgtcgccagcgaatttcccggtgacgtaacccgtaatagtgtaataaacgaccgacaatcagcattaatccacacagatgaatcatccaggtctctgcgccgttcatttccatcataaccagcaataccacggcgatcggaatatattctacggcattgccgtgtacccgtatggccgtttgcaactcataaaacccaccgtcgccataggctacccggtactggtttcttaatctcaccacatcaaatgaaagcttaattagtaatagtgcgcccaacacaacataaagcgagctaaccatttttaactccatagcccaaccataactggctgaataatgataaccgtcaacgtcgtcactgtcgctagaaaaatcgaaagtctactatctataatcgctgttgtttatagagtagaaataaatacctgccaccattcagccttgcattttgtcgaaatgagcgtcagttctcatttttcaccgatttctggcgtttctactcttttaaatgtgcgacttctcgccgcccttcattttgatgcaaatcatgacaaactgccgggattggacaagggaattttctgctaaaacaatgtgttttgctctggccaatccggcgcgggaggtaaagaaggtattaacgccgctagccgttgccagattttttgcgcttgctgcggtgaatcgccattatccggcgtatgaataaacagataaggctggtgctgatgctcccataccggcagtttttgcagccagggggcgaaaagtttcagattttcatccagcctatcgccgccgataaaccgcaccagaggttgatgaccggtaaccacggcatgtaccggcagtttgggttttttactttgcgcgtcccgcaccgcggcggtattgggtgcggcgctgtggatcggacggctatcgagaataacccggttaacttgccgttggtgcaaaccttgattgagcgccagttcctccccgcctttggcaaaaaaagccggatgccgaacctccacaccatagttaaagtcacggggtaatcggtcgagaaagtgaaacagccgcggcaattcacgcggcccaaaggcggcgggcaattgcagccacagttggccgatacgctgattgagcggttccaacgtctgataaaaggttaataattcctgctcgcactgactgagtgccgcctgatggctgatagtggcggggaatttgaagcagaaccgaaagctttccggtgtcatatcccgccagcgcagcacaatttccggtttcggcagcgcataaaaagtggtgttgccttccacgcagttgaaatagcggctgtaatccgccagatcctgcaaacctaaccggctccatgccgaatgttgccattgaggtaatccaatatacataagtcagccgctgcgaaagaaagaaacaacgcggctcagctcacaaacgaagccgctaaaaggtacccttaccttaacgtcaggcggttagcgcggcaataatttcattgctgctacggacgcgagaaaaacgcgggaagatgtggtggaagctggcctgatgctgctcggtgtccggagcgctacaggcgtcttcggcgatcaccagctcgtagccgtgttcccaggcggagcgggcggtagattcaacgccgagatttgtcgcaatcccgcccaacacgatggtttttatcccgcgccggcgcagttgcagatccagttcagtgccgtaaaaagccccccattggcgtttagtcaccagaatatcgctatcgcgaaccttcaactgcggcgggaaatcccaccagttggcaggtaaacggccagccgggtttgggcgatcgaccggcggatgcaatacgtcggcaaaatctcccgaccagcccacgcgcacccaaaacaccggagcgcctaattgacgaaactgttcggctaggtgtgcaccatgattgacaacttgttcggcactgtacgggccgccggcgtaagggagaattccctgttgcaggtcgatcagcaccagtgcgctggtttttgcttcaattttcatcatctttggcctcgaacagacatgggctaaatgaggtttatggcctctggtgcctccgagtttatgccaacaaatgttgccgaacagtcttatcacggggagaattttgttaaatgatgtgttaaatcaccgcagagagtgactttgtcgtccctgacctgtgcgttcgctcttatctatgccatgaatttcctttataatgacccccttttttcaacactctttaatccaaaatacctatgccaatttatgaatatgcgtgtagcgcgtgccaacatcgattagagaaactacaaaaattttctgatgcgccactgacagactgtccggcgtgtgggaagcctgcgttatcgaaacagatatctgctgccggttttcagctgaaaggcaccggttggtacgccactgatttcaaaccgggtgccaaaaaacagggttcaccagagtaagggttcaccagaataatagccgcgcgaacagttcagaacactcgacgggcgcggcatcggctgagtaaaaggacattgtatgcgtactgagtattgcgggcagttgaatctgtcccacgtgggacaaagcgtcacactttgtggttgggtcaatcgtcgccgtgacctgggtggcctgatttttattgatatgcgtgaccgtgacggcatcgttcaggtgttcttcgatcctgaccataaagcggcctttgagcaggcttctgagctgcgcaatgagttctgcattcagattaccggtactgtgcgtgcgcgtccggaaagtcagatcaataaagatatgtctaccggtgaagtggaaatctttgccaactcactgaatattatcaaccgttctgagccattgccgctggactccaaccagatcaacagcgaagaacagcgtttgaaatatcgctatttggatctgcgtcgtccagaaatggccgaccgcctgaaaacccgcgctaaaatcaccagctttgtgcgccgctttatggacgatcacggtttccttgatatcgaaaccccgatgctgaccaaggcgacgccggaaggtgcgcgtgattatctggtaccaagccgggtacataaaggcaaattttacgcgttgccgcagtctcctcagctgttcaaacagttgctgatgatgtctggcttcgaccgttactatcagatcgtaaaatgtttccgtgacgaagatttgcgcgccgatcgccagccagaatttacccagatcgatgtggaaacttcctttatgagcgccgatcaagtgcgtgaaatcatggaaaaaatgattcgtcagctgtggcaaaccaccaaaggcgttgatctgggtgatttcccgatcatgacttttgcggaagccatgcgccgcttcggttcagataaaccggatctgcgtaacccgttggagctggtggacgttgccgacttagtgaaagacgttgaattcaaagtgttctccggcccggcgaacgatgcgaaaggccgcgttgctgctattcgtgtacctggtggcgcgcaactgactcgtaaacagatcgacgaatacggccagtttgtcggtatctacggcgcaaaaggtctggcgtggttgaaagtcaatgaccgtgctgccggtatggaaggggtgcaaagcccgattgccaaattccttagtccggaagtgttggaggccattctggctcgcactcaggctgaaagcggcgatattctgttcttcggcgcagacagcttcaaaatcgtcaccgatgctatgggcgcactgcgtctgaagctgggccgcgatctggaactgactaagctggatagctgggagccgctgtgggtggttgatttccccatgtttgaagacgatagcgaaggcggtctgacggcgatgcatcacccgttcaccgcgccgaaggacatgacgccagaagcgctggcagcgaacccgacttctgctatcgctaacgcctacgatatggtgattaacggttatgaagtcggcggcggttccgtgcgtatccaccgcaccgaaatgcagcagcaggtctttggcattctgggcatcaatgaacacgaacagcgtgagaagttcggcttcttgctggatgcgttgaaattcggtactccaccgcacgccggtttggcctttggtctggatcgtctggtgatgctgctgaccggtactgataacatccgcgacgtgattgcgttccctaaaactaccgccgcggcctgtctgatgaccgacgcgccgagttttgccaacccggcctctttgcaagagctatcgatcagcgtcgtagcgaagaaaaccgcagccgatactccggcagaagagaaagagtaatgaaatacaaacgccccgagtcaattttggcgctgatctatgcccaatctacgggtcgggtgctgatgttacagcggcgtgatgaccctgaattctggcagtcggttaccggcagtctggaggagggggaatccccattgtctgccgcgcagcgtgaagtaaaggaagaagtgggcattgatatcacaggtgaaaacctgacgctgctcgactgtcagcgctgcgtggagtttgaactcttcgcgcatttccgtcctcgctatgcaccgggtactacgcataataaagaacactggttctgtctggcgttacccgaagagcgtgatgtcaaacttaccgaacatcatgcgtaccagtggcttaactcgccggaagcggcggcattgactaagtcctggagtaataagcaagcgattgaagagtttgttatttattaggtctaattaggctattttcggagattcttatggcaggtcatagtaagtgggccaacactaaacaccgcaaagcggcgcaggatgccaaacgcggtaagattttcaccaaaattatccgtgaactggttacggctgccaaattaggcggtggcgatccggctgctaacccacgtttacgtgcggctatcgataaggcattgtccaataacatgacgcgcgacaccctaaaccgggctatcgcacgcggcgtgggcggtgacgaagataacaacatggaaaccatcatttatgaaggttatggtccgggcggcaccgcggtaatggttgaatgcctaagtgacaaccgtaaccgtaccgtatctgaagttcgccacgcctttaccaaaaccggtggcaacctgggcactgatggttccgtttcttacctgttcaccaaaaaaggcgtgatttcttacgccccaggtctggatgaagataccgtgatggacgcggcgctggaagccggtgccgatgatgtgaccgtgtatgacgatggtgctattgacgtgttcactgcgtgggaatctctgggtcaggtaaaagacgcgctggatgcggctggtctggtggctgaatcggcggaagtgtcgctgatcccatcaactaaagccgatttggatgcagagactgcgccaaaactgctgcgtttgatcgatatgctggaagattctgacgacgtgcaagaggtttaccataacggtgagatctccgacgaagtcgctgctacgctgtaatgagcggcaatcagcgtgatttcatgtaagtcatcgcggcaacagcgttaaagcagtaaagtcgccgtgctcattattgggcacggcctatttttaggtgggtgtggttcccaacgataacggacaaggtgaaaactggtatggcgatcgtattaggtatcgatcccggttctcgtgtcaccggttatggcgttatccgccaggaagggcgccaactgacctacctgggcagtggttgtatccgaaccgtggtggacgatttaccgacccggttgaaattgatttacgccggtgtgactgaaatcattactcagtttcacccggacttttttgctattgaacaggtgtttatggcaaaaaacgctgattcggcgttgaagctagggcaggcaagaggcgcggccatcgtcgcggcggtcaatctggatctgccggtgtctgagtacgcggcaagacaggtgaaacaaacggttgttggcaccggcgcggcagagaaaagccaggtacaacatatggtgcgttcattactgaagttaccggctaatccgcaggccgatgccgccgatgccttggcgattgcgattacccactgccatctcagccagaatacggtgcgattgggtaataaccaattggtcatggcacgtggccgtttgcgttaattttgtgcaacggcgcgcaaagacccgataaagccgggttaatcgctgaaggctggatatccatccagccttttttatgttataaacagctataaaatatattcatcgataaacctgccgggcaaggagacagtcaaggtgatagggcgcatcagaggtatcattctggaaaagcagccgccgctggtgctgctagagaccaacggcgttggctatgaaatccaactgccaatgacctgtttttatgaactgccggagatcgggcaggaagccattatctttactcagtttatcgtgcgggaagacgcgcagttactctatggtttcaatgataaacaggaacgtgcgttattccgtgaactgattaaggtcaacggcgttgggccaaagctggcgctggcgattctgtccggtatgtcggcgcagcagtttgtcggtgccgttgaacgtgaagatatcactacgttggtaaaactgccgggcgtaggaaagaaaaccgccgagcgtttagtggtggaaatgaaagaccgcttcaaaggcttgaacggcgatctgtttaataacaccggtgagatcccgttgcctaccacctcggcgcaggtttctgcggcagacacggaggcagaggccgtttcagcgctggtggcgttgggatacaaaccccaggaagccagccgtttggtcagcaaaattgccaagcccggcgcagactgtgaaacactaattcgtgacgcgttgcgcgcagccttatagtagtgacagcaagaggtagaggatgattgaagcagaccgcctgatttcggctggcgttatcagtgaagaagagatcattgaccgagcgattcgccccaagctattaagcgaatatgtcgggcaaccccatgtccgcgagcagatggaaatctttattcaggcggcgaaacagcgcggtgatgcgctggatcatttgctgatatttggccctccgggtctgggtaaaactacgctggctaatattgtggctaacgagatgggcgtgaatctgcgtaccacttccggcccggtactggaaaaagctggcgatctggcggcgatgctgaccaaccttgagcctcatgacgtactgtttattgatgaaattcatcgcctatctccggtagtcgaagagattctttacccggcgatggaagattatcagttggacataatgatcggtgaggggccagcggcgcgttctatcaagctggatttgccgccctttactttgattggtgccacgacgcgtgccggatctctgacttcaccgttgcgggatcgctttgggattgtgcagcggctggagttttatcaggttgcggatctggagcatattgtcagccgtagcgcccaatgcctgggattggaattaacgccggaaggtgctcatcagctggcgcgtcgatcacggggcacgccgcggattaccaatcgcctgctacgacgggttcgggacttcgccgaagtgaaagccgacggtgccattaatggtgatgtggcgatgaaagccttggatatgctgaatgtggatgcggaaggctttgattacatggaccgtaagctattgctggcagtgattgataagtttatgggtggcccggtagggttagataatctggcggcggctatcggggaggagcgtgaaaccattgaagacgtgctggaaccctatctgattcagcaaggttttatccaacgcactccgcgtgggcgtattgccacgcatcatgcctacaagcattttggtatcgatcgagaagagtaatgttgtaagcggcggagtctgcctgaatgagacaactccgccgaatgactgtgcctgaattaggttttaaaccgtggctttctcggctactggcgtattcaccattcggttcaaccatggaatcatcagccccatcacgactgcaatccccagcgtagtcaaaccgatcttaccgaacacatcggtatagataggcaaggtttccaatgggtcggtaatgccttccggcgtcgcggtgaaggtcgcaacgtagcccccaatcaggaaggatgctgcctgtgtcaggaaccacatccccagaataaagcccatcaaatactgaggcactaacgctgctaccatcgccagacccaaggcgctaatcattaattccccgatactctggaatagataaaccagaacgataaaccaaggtgatgtcaggccctgggcatcggcaaaccacataccggctgccgcagcggtcaaaaatcccagcgagcataagaacatgcccaaagtgaatttggctggcatagtcaaatctcgtcctttactaccaaaacgagtgtagaggctggcgagaatagggctggcaacgaccacccaaaacggattgagtgcctggaagctgactggattaatggcaaaacccagtatttcgtgatgaacgttattaattgcgaagaaatttagcgaggttggcatctgcgcgtacagcacgtagaaaacaatagcttccaacatcaaaatgaaggcaacaaacatcttattgcgccccaatgtatcctgcttgaatgcttctttgaagaaaataaaaaccaccactaatgacagcacgattaacaccagattggcgatcatgacgtgattcatcagccaggcacaaacaaataccataatgaccgtaccggccagcaccagaaacaggtttttccagtttagcggctgggcgtccggctcggatcctatatggcgaaccatatgacggcagcagaaataaaccagcagagcaaagatcagaccgataccgcacagatagtaagtgacagtgtaaccatagcgttcggcgataattggggctaacgacagagaaagcaacgaacctacgttaattgacatataaaacagggtaaaagcaccgtccaagcgaggatcttttggcgggtagcacttggataataagctagctggattagctttaaataaaccattcccaacagcaataatccctagggcgataaaaatcagattaggccggtacaaggataaaccggtagcgaaataaccaatggccagcaccactgcacccagcaccatggtgcgcttggttcccagtaaatgatcgccgacgtagccaccgatggaaatcaggccataaaccaaagcggcaaaagccccgaaagtcacaaatgcctgttcttgtgagaagcccagctgtttaacaaagaaaaccgcgagaatgccctgcacgccgtagtagccaaacctttcccacagttcgacaaagaagatcataaagaagggtttgggctgctgtaataaaccggttggtgtgggtttatccatgatggtttgcctctgaataatagttatgagtgggtagggcgcgcacaaatccgtcccggcgcgataaagaaagccgaatagaatagtgaaaatgttttctcaaaaagcaacgacggcagagtattacactgggtgaatattatgtttgtggctgatcacactaattaaaacttactgagtggtttttgtatccgacatgtttatttcgtacagaatgttatcaaattcaaaaaaatataactgaaataacaacggcgtaagcggttgcgcccaaaggctatttgggagggaaaggtgaatatcagcaaaatgcgggataaataagcaggcgaaataagaaacaggaagtataaagcaggaggtaagaggaaaagtataagaggtcagaagtccaaatcaacgcacggagggagctgcgaacttgctccctccgcagagctttatcctctgggtttttgcgacaggcttagcacaaacatcattgcggcgcagagcaccacggatgggccagctggcgtatcgtacagcgcagagaaggtcaggccgccggttacagcgagaatgccaatcaccacggcgaccccggccatttgctccggcgttcgggcaaaacgacgggcggcggcggcgggaatgatgagcaatgacgtgatgatcagtgcgccaacaaatttcattgataaaccaatggtcaacgcggtaattagcatcaacagcattttgacccgctgtaggttaaccccgtcaacgtgtgccagctccgggctaatggtcatcgataacagcggccgccactgccagcgtagcaccagcaataccacggcgacgccgatggcaatcatccagatatcattgagggtaactgaaagcaggtcgccaaacagataggccatcaggtcgacccgcacatttgacattaggctgacgacgactagaccgagcgacaatgcgctgtgcgccatgatgcccagtaaggtatcgacggccaactgcgggcgacgttcgagccacacgagaaccagagccaatatcagcgtcatggcgatcaccgcgtaaaacgggttcacattcagcagcaggccaaatgccacgccgagcagcgaggcgtgagccaaagtatcgccgaaataagacattcgacgccagaccacaaacgaccccagcgggccagcggcgcaggccagcaggacacccgctaaccagccgggtaagagtaattcgatcatgcgtcacggctccctgggttttttagaataattttgccatgcaaatcgtgacgatgattatggtgatgacggtaaacggccagtttttcggcaccgcggttgccaaacatggcgatgaattctggatgggtagaaaccacttctggcgctccggaacagcaaatatgttgattaaggcataatacttcgtcggttttcgccataaccagatgcagatcgtgggacaccatcagtacgccgcagcccaattcggtacgcagttgttcaatcagatcgtacagtgccagctgcccgttgacatcgacaccttgtgtcggttcatcaagcaccagcaactgcggcttattcaacaaggctctggctagcagtacccgctgattttcccctccggacagtttctgcatgggctgttctaataaatgggcagcatggacgcgtttcagcgccggtaaaatatccgcttgcttcacgccgggcttaaggcgcataaaacggctcaccgtcagcggtagagtggcgtccagatgtaatttttgtggcacatagccaatacgtaatccaggctcccgaaccacggaaccgccggtaggggcgatcaatcccagcaccacacgaaccagcgtcgattttcccgcgccgtttggcccaagcaaagtgaggattcttcccggctgtaatgagagggaaatatcagcgagtacccgccgattcccgaaggtaacggatattttgttcagacttaccaatgtggacatgatgattacgtttgcagaattaagtgaatgttataatattacgcttttccagcggaaaggacgagttaacttaccatgttcaagagaaataacgttatgttacaaaaaaaccaatggctacgaagaaccctattagccagcgccgttttgatggcaggtgtggtacatagcgcatcagcagcggtagtcacctccatccgtccgttgggatttattgcggcttctatcgctgacggcgtgctgccaacggaggttttactgcccgacggcgcttcgccacacgattatgcccttcgtctgtccgatgtccagcgtttacgtcaggctgagctggtaatttgggtgggaccggaaatggaggcctttctgataaagccattgacgcaagtccctgccagcaaacagattgctgtttctcaattgactcaggttgcagcgcttttaatgaaaggcgacgagcatgatgaacatgaaggtgagcatgacacgcatcatgatgatcatgcagcgaataatgatgaacctggacatcaccacggtaagtacaacatgcatgtttggctttcgccagagatcgctaagttgacggcaattgctattcacgaccgattattggaacttatgccacaaaatcgggacaaactagatgcaaacctgcgccgattcgaggatcaactagcgcaaagtgacaaaaaaattgctaatatgctgaagcctgtgcagggtaagggatattttgtttttcatgatgcctatggctactttgaaaaacactttggcttggccccattgggtcactttacagtcaaccccgaaatacagcccggcgcacagcgtttacttcaaattcgaacacagttggttgagcaaaaggcggtatgcgtttttgctgagccacaattcaggccggccgtcattaatgccgttgccaagggaactcaggtgcgttcaggcacgctggatccattgggtagcggcatcgcattgggcaaagacagctacacagagtttctgtctcagttgtctgaccaatacgagagctgcctgaagtaagacttataaggatactcataagtgcagcagatagtccgaactatcgctctggcgtataacaacttaccgcggccccatcgagtgatgttggggtcgttgaccgtaatgaccttggccgttgccgtttggcggccatttgtttatcacccagaacacgatcccatcgcgaagagcgttattcttgataccagccaggcgaacattttggctccagaagccagtgagccgctagaccaaccgagtccggacgatgagattcctcaggacgagctggacgctaaagatgttaatgaaagtggcgttcatgaatatgtggtttccaccggcgatacccttggcaatattctgactcagtacggcatcgagatgtccgatgtggcgttactggcttcgcaaaaccgcgacctgcgtaatctgaagatcgggcagcaaatttcctggacggtgaacgattccggcgatttacaacgcctgacctgggaagtgtctcgccgtgagacgcgtacttacgatcgcgttggcaatacctttaaagaaactaaagagttgcaaaaaggtgagtggcgtaacagcgtaatgaccggtcgtctggacggcagtttcgttaacagcgccaagaaagccggattgaacaactcggaaattcgcgctgtgactaaagccttacagtggcagttagatttcagtaaattgcgtaaaggcgatcagttcgccgtgctgatgtcgcgggaagtgctcgacgggcgcagtgagcaaagccaattggtcggcgtgcgtatgcgctccggcggcaaagattactatgctattcgcgccgaagacggcaagttctatgatcgtcagggttccggtctggcccgtggctttatgcgttttccaaccatgaagcagttccgcgtgtcttccaactttaatccacgtcgtattaacccggttaccgggcgtgttgcgccgcacaaaggcgtcgattttgctatgccggtcggtactccggtactggcggtgggcgatggcgaagtagtgattgcgaaacgcagcggcgcggcgggcaactatgtggccattcgtcacggtcgccagtacaccacgcgttatatgcatttgaaaaagctgctggttaaaccgggtcagaaagtaaaacggggcgatcgtatcgcactgtctggaaataccggtcgttccaccgggccgcatttgcactatgaattctggatcaaccagcaggcggttaacccgttgacggctaaactgcctcgttccgaaggattgagcggtaaagaacgcagcgattatctggctattgcgaaagaagtgatcccgcagttgcagctcgactaaccggtaattccactcaggaattcttgagcggaataaataaaatctaatgtggtcgttatggtgatattcattgtaacggccacgttggtgatcaacaggtcaggttttttagcctgatatcagtttttacagtcagatggacaattgcattctctatcttcgcaattatgattagctgattggcctattcgaagagtttcctgatgcaaaaagagaagaacgacagcgcgggttttattccggtattccaaaaatcattccttcatccgcgtttttggggcgtatggctgggcattggcgtgatggcagcgctggcttatttaccggcaagaattcgcgatccttttttagccagtgtaggccgtttggccggtaaattcgccaaaggcgctcgtcggcgcgcgcggataaaccttctctattgtttgccggatatcagtgagacggaacgtgagcaaattatcgatgagatgtttgccactgcgccgcagccgatgatgctgatggccgaactgtgtttccgcgatcctaagcacgtgttgtcccgtgttcattggcatggtgaatctgttttagatgaactccagcagcaagggcgcaacgttattctgctggtgccccacgcgtggtctatcgatattcccgccatgttattggccgggcaggggaaaccggtcgccggaatgttccatcatcagcgcaacccgctggtagattatctgtggaacagcgctcgcctgcgtttcggtggccgcattcatgcgcgcgaaagcggcattaagccttttatcagctcggtgcgtcaggggtattggggctattatctgccggatgaagattacggcgcagagcagagcgagttcgttgacttcttctcgacctataaggccacgctgcctgcggtagggcgtttgatgaaagtgtgccgtgcggccattgtgccgatgttccctgtttataattaccgtgaacatcgtttggatatttatattcgtccaccaatggatgatttagcggatgcggatgacgcttatattgctcgtcgcatgaacgaagaagtagaggctttggttagccctaacttagagcagtacacttggattttgaaactgctgaaaacccgtaaagaaggtgaaatcgagccttacgtacgcaaggatctgtaatccggcgtgagcgggccgcgcgttcagtagtgaaaagtgaaataaaatgcagataaagaaaaagccagtcaacttaacgcggactggcttttttattggcgcagaataattattccacgcgaataatacggctggtgttagtcgtacctatggtacccatcacatcgccctgagtgacgataaccagatcgccagaaaccaggaagcctttatcgcgcaggcagttaaccgcttcattggcagccactacgccatcggtgtggttggcgcaataaaccggcgtgacgccgcgatagatcgcggtcaggttcagcgtatgttcatgacgagacatggcaaagatcggtaaacccgagctgatacgcgacatcatcaaggcagtacggccagattcggtcatggcaatgatcgccgtgatacctttaaggtggttagccgcgtacatcgtggacatcgcgatggcttcttcgacgttatcgaattgcacatctaaacggtgcttggaaacgttaatgcttgggattttctctgcacccaaacagactcgcgccatcgcggctacggtttcagccggatactgacccgccgccgtttctgctgacagcatcaccgcatcggtcccatccaacacggcgttcgctacgtccataacttcggcgcgggttggcattgggttggtgatcatcgattccatcatctgcgtggcggtaatgaccgcacgattcaactgacgggcacgacggatcagttttttctggataccgaccagctctggatcgccaatttctacgcccaaatcgccacgggcgaccataaccacgtcagaggcgaggatgatgtcatccatggcttcgtcagtggctacggcttcggcacgttcgactttggagacaattttcgcgttacagccagcatcccgcgccaaacggcgggcataatgcaagtcttcgccagtacgcgggaaggagacggccagataatcgacgccaatttttgcggcagtcacgatatcagctttgtctttctcggtcagcgcttcagcggataaaccaccgcccagtttgttgatgcctttattgttggaaagagggccgccgacggtgacttcggtgaacactttcatgccctgaacttccagcactttgagctgaacgcggccgtcgtcgagcaacagaatatcgcccggcaccacgtccgcaggtaagcctttgtaatcgataccaactttatctttgtcgccttcgcctttacccaggttggcgtctaacaggaacttatcgccaatattcaggaagactttgccttccttgaaggtggatacacggatttttggcccttgcaaatcgccaagaattgccacgtgacgccccaaacgcgcggcgatttcgcgcactttattagcgcgtaacatgtggtcttcagcggtgccatgggaaaaattcaggcggactacgtttgcacccgcagcaataaccttttccaggttattatcgcggtcggtagccggccccagtgtggtaacaatcttggtccttctgagccgtctggacatgcattactccgttgactggtgaagcattggtgttgttaaaactgcggataattaaccctagggcaaaatgtcactgagtgacgagttttactctgaaattgtgtcatccaaattaaccgcatgcgaatgtagaaacgatagctgtgtaataggttatcggcgcaaaactgaaataaatcagctctaagcgatatttttagcgtcgggcgtttattcaatcaggccctgtaaagacgcgcccttatcaaagcgcgattctttcaacgcttctttgacccgcttcaagttatccctgaatttatcgccgcggcgtaaagtaaatccggttgccagtacatcaatcagtgtcagttgagcaattcgtgacaccatcggcatataaacatcggtatcttccggaacgtccagcagcaatgacagcgttgcttcgtgtgccagcggcgtgtctcgcgaggtaatggcaataacggtcgcatcgttctcgcgtgccagacgggccatttctaccagattcttggtgcggccagtgtgggaaatcagcaccacaacgtcaccttccccggagttcatacaactcatgcgttgcataacgatatcatcgaaataaataaccgggatattgaagcggaaaaatttattcattgcatcatgggcgacggcggcggatgcgcccaggccaaagaaggaaattttcttggcctgagtcagtaagtccaccgcccgatttatcgctgcaatatccagattggttttcaccatatccagactggccatcgtcgattcgaaaatcttgcctgtatatgcagcaacactatcattttcttcgacgttacggttcacataaggtgtgccatttgccagactttgggctaaatgcagtttaaaatcagggaagcctttggtatccagacggcgacagaaacgattaaccgttggttcgctaacgttggccattttcgccagcgtggcgatactagagtgaatggcagtttgtggggaggcaaggatcacctcggcgactttcctttcagatttgctcaggaggtccagattattttggatcttttccagcgtattcatataacgagagtcacccatgggttttgtcgatttcattcaaaggagaaatctatgccggtttaatggaaatatactacgagccgggacccgttggcagaggcattgatgaggaagcagccctttttcatcagaatatgacctgtgtctaattttcagaatggtaaaagacgatcaaaaaagtcataaaattacatttttatcttacgccgccttatttgacggggcttagcgcctgataggatgttttataaccgtttttattgcctttttatccgggtttactggctatagtcaaagagagtacattatagatgtaagaaaattacaaatatcctgcaacgaggagaaatacatggcggtaactaatacagcccaggcatgcgacctggttattttcggcgctaaaggtgacctggcacgccgaaagctgctgccttccctttaccagctagagaaagcgggtcatatccatcctgatacacgcattatcggtgtgggtcgggctgactgggataaagacgcgtatatcggcgtggtgaaggaagccctcgacacctttatgaaagaaaagctggatgacgaactttggcagaagctcagcagccggctggatttctgtaatctggatgtcaacgacagcaagcactttgctaaattgggcaaaatgctcgatcaaaaaaaccgcactaccattaactactttgccatgccgcctagtactttcggtgccatctgcaaaggtttgggcgaagccaagctgaataacgaaccggcgcgcgtagtgatggaaaaaccgttaggaaccgatttggcttcctcacgggtgatcaacgatcaggttgctgaatactttaacgagtgtcaggtttaccgtatcgaccactatttaggtaaagaaacggttctgaacctgttggcgctgcgttttgccaactcactgtttgcttccaactgggataaccgcactatcgatcacgtgcagattaccgttgcggaagaagtgggtatcgagggccgttggggctacttcgatcaggctggccagatgcgagatatgattcaaaaccatttgctgcaaatcctgaccatgatcgccatgtcgccaccggcagatttgaccaccgaccgtattcgcgatgaaaaagtgaaagtgctgcgttcactgcgccgtatcgatcagaccaacgtgcgtgaaaccacggttcgcggtcagtacaccgccggtttcgttcagggtcacaaagtaccgggctatctggaagaggaaggggcgaataagagtagtaataccgaaacctttgtgtctatccgcgtggatattgatgactggcgttgggccggcgtgccgttctacctgcgtaccgggaaacgtttgccgaccaaatgttcggaagtggtggtgtactttaaaaaccctgcgctgaatctgttccgcgagtcttaccaacagttgccgcagaacaagctgaccattcgtttacagccggacgaaggcattgagattcaggtgctgaataaagtgccgggtctggatcataagcaccgcttgcaaacgactaagctggacttgagtttctccgagactttcaacgaagagcatatcgctgatgcctatgaacgtttgttgctggaaaccatgcgcggcattcaggccctgtttgtgcgtcgtgatgaagtggaagaagcttggaaatgggttgactccatcatggaagcctgggcggcggataatgaagcgccgaagccttaccaatccggtacctggggacctgtagcctcagttgccatgatcactcgcgatggtcgttcatggaacgaattcgagtaatcgtttaacagcataaccatcagtaacctcactaccccggtgccgcagacacagccggccgctgaccggcggggtagtgcatccatcagggaatgcctggatgaactcacggacggagcacctgcgcgattataagagccattcaaaggcttagttctgattttgtttcatggcaggcagtatagaagaggcgggtcactttccgtgggtcttcggctgagtgccatcttttaaccgatgcctagaaggcaaccaacatagccctgaatggaaaggcatcaatcctatgtcagacggcataagtggagataacgaccgatgaaaagctggaaaacgagcgcagaacagattatgaccgcaggtccggtggtcccggtaatcgtcatcaataaactcgaacaggcggtgcctttggctaaagcgctggttgccggtggcgtacgcgtgctggaagtgactttgcgtaccccgtgcgcagttgacgcgattcgcgccattgcacaggaagtaccagaagcgattattggtgccggtaccgtgctgaatcctgagcaattggcagccgtgaccgaagcgggcgcccagtttgctattagccctggcttaaccgccgatctgttgcaggcggccaccgcaggcacgattccattgattccaggcattagcaccgtttctgaattgatgctaggcatgagttacggcctgaaagagttcaaattcttcccggcggaagccaacggtggcgtgaaggcgctacaggctatcggcggcccgttctctcaggttcgcttctgcccaacaggcggtatcacgccaaataattaccgtgattatttagcgctgaagagtgttttatgtatcggcggctcctggttggttccggccgatgcgctggagaaaggggattacaatcggataaccgagctggcgaaacaggcggtagaaggcgcagcggcataagctgtctaagcccctgaaccggcgagataatttctgcttttctctagaattgaaaacccccaggttctgggggttttgtatttttgaaataactaaagtgctcttttataaacttttttttctctaattttttcaaattggcggtttgctttctatttttgcctatggtacaaatagctcagttaattattctaatttgatgaggatttgaggcaaatcgcactcggtttcacgaaatatgtgcggctaaaaaagagaaaacattatgattaaaactaacggaattactctcaaaacttctacctgccaactcttcctgtctgccattctagccagtgaacatcactggtgcagcgagctttagcgtcactctcccttaaccggcgcggcatttaactccgcataatccgggcatagcatttttatacgccaagtgagtatctatttcttacggcctacgcacgtctgcaatctgtgatttcagcttgtgcatgaggataaccgtaacaaatagaccttagcgtgcgttttcgcgtgttaggagagattttatgatttattggatttttttaggcttagctatcgttgcagaaattattggtaccctttcaatgaaatacgccagcgtcagcggcgaattaaccggccatttggtgatgtatgtgatgatcaccggttcttacatcttattggcgatggcgattaagaaagtggcattgggcgtggcttacgcgctgtgggaagggatcgggattctcattattactctgttcagtgtgctgtggtttggcgaaacgctgtctccgttgaaaatcgccggtctggtgaccttggtgggcgggattatgctggttaaatccggcacccgtaagccgaaaaaaccgggtcagggcggtggcatcaagctccccggagcgctgaaagccaaagtcactggccagccgacattagcggttaagtcaggtggggatcatgcaacagcttgagttttaccacattggctttttgattctggcggtgattttagaaattcttgccaatattttgttgaaaatgtcagacggcttccgtcgggtttggttagggattttctccctgctgtcggtacttggtgcgttcagcgctttagcgcaggcggtaaaaggtatcgatctttcggtggcttacgcgttatggggcggttttggtattgccgctaccgtcgcggccggttggattctgtttaaccagcgattgaattataaaggctggattggtctgattctgctgctggccggtatggtgatgattaaactggcgtaacaccggggatcgcactgactcagtaacaaactacagaaaagtcacagagaaaccatataaaaacaaaagggtagccggtgcatgcgggctacccttttgtacgatttaacgtgcggcgataattttaatttcgactttatactgcggattcatcaacttagcctgaacggtgcagcgtaccggtgcgctgccgtcaacgacccaagcatcccaggcggcgttcataccggcaaagtctgcagcgtcggccagaaaaattgtcgcatcgaggattttgctcttgctcgaacccagatgattcagcagcatatcaatagcggccagcgtattggccgtttgcgcggtaatatcagcatccagattttccggtacgccggtgtaataaatagtgtcgttatacaccaccgcatctgaccagcgtttttccgggttaattcgttcaatgctcattttcactcctttgtgtgaatatcgttatctgctacctctatcagggtaacataagtgatcgcgataatgtgtgtggtgcctcagcctcatgcttggcataatcagcgctgatttgattcggcagagagaaagtgtgacagacgattttgcaatagacggcgctttagcgcaggcgataaccggttttaacccgcgagaatcacagcgtcagatggcgcaggcgatcggcgaagtcattaccaccaaacaacaattggtggtggaagcaggcaccggtaccggtaaaacctatgcctatttggcaccggcgctgcgtgcagactgcaaagtcattatctctaccggttctaaggccttacaggatcagctgtattcccgcgatctgcctacggtcgccacggcgttgaaatataaaggcaaactggcgttgctaaaaggacgctccaactatttgtgtctggaacgtttggaacagcaaactctggcaggcggtgagctggcgggagaaacgctggtggatttagtccatttgcgcggctggtcgtcacaaaccgtagacggtgatatcagcacctgcggcgatgtggcggaagacagtttcgtctggccgttagtcacaagtactaatgataactgtctgggcagcgattgcccggcttatcaggactgttttgtggtgaaggcgcgccgccgcgcgatggatgcggatgtggtggtcgttaaccatcacttgtttttggcggatatggtggtgaaagaaagcggctttgccgagctgatccccagcgctgacgtaatgattttcgatgaagcccatcagattcctgatatcgccagccagtatttcggccagcagctcactagccgccagcttatggacttagctaaggatatcaccatcgcttatcgcactgaggtgcgagattcggtacagctacagaaaagcgccgaccggctaagccaaagtgcgcaggatttccgattggtgcttggcgatcccggattccgtggcaatctgcgagacgtactccagcaaccggcgatccagcgggctttgctgctgttagacgatgctttagagctgtgctatgacgtaatgaagctgtcgcttgggcgctccgctatgctggatgcggccttcgagcgagccacgctatatcgcaaccggttgaaacgtttgaaagaagtgactacgccgggttatagctattggtatgaatgtaatgcgcgccatttcgtgctggctctcacgccgctgtcggtttccgatcgtttccgcgagttaatagaagaaaaagccggtacctggattttcacttcggccactttatcggtgaacgatcagctagggcattttactcaacgtctcggtttaaccgatgccaaaaccctgctgcttcccagcccgtttgactacgccaatcaggcattgctgtgtgtaccacgaaatttgcccaatgccaatgagccgggcggggcacgtaaactggcacaaatgctcaaaccgatgattgatgctaatcagggacgctgctttttcctttgtacttctcatcagatgatgcgcagtctggcggaggagtttcgcgccagcatgacgttaccggtgctggtgcagggtgaaaccagtaaaggccagttactggctcagttcgtcgctgccggtaatgcgttactggttgcaaccagcagtttctgggaaggggtagacgtacgcggcgatgcgctttcctgcgtgattattgacaaattgccctttacttcaccggacgatccgctattgaaagcgcggattgaagactgccgattgcgcggcggcgatccgttcaacgacgtgcagttacccgatgcggtgattaccctgaaacagggcgttgggcgtttgattcgggatattgacgatcgcggggtgctggtgatttgcgataaccgtctggtgatgcggccttacggtgcggtattcctcaatagcctgccgcccacgccacgtacccgtgatttgaccaaagctatcgctttcctgaaacggcaggagtgagggtaaagccttgtggggtgtgctattatgcgcgccctgtgttgaatatagattctttttcctgccgaggttggcatgtccacgcgaattttagcgatcgataccgcaacagaagcctgttctgttgcactctggaacgacggcgcgatccacgcccattttgaactttgtgccagagaacacactcagcgaattcttccgctggtgcagcaagttttaaccgaatcccacctgacgttaactcagttggacgcgctggcctttgggcgcgggccgggcagttttaccggtgtgcgtattggcatcggcatcgggcaaggattggcgttgggtgccaatttgccgatgattggcgtttccacgttgcaaaccatggcgcagggtgcatttcgtctgatcggcgcaactcgcgtattagctgcaattgatgcacgtatgggcgaagtgtattggggacagtttgaacgccagactgacggtagctggctgggcgaagaaaccgaagcggtactgactccggcgcaagtacaagagatgacgcaggatttaagtggcaattgggcctttgttggcaccggttggcagacttatcccgatctggtcgcgagtcatgcggctatactgactgatgggcaaatgttgttgccgcaggcggaggatatgctgcctctggcgatccaactgtggaacaacggtgcggccttaccggttgaacaggctgaaccggtttacctgcgtaatgaagtgacctggaaaaagttacctggacgataaaatatggcaacttgtctctgaatttatggtcttaaagtttaagattaattaaggagataacggcgatgacacccagtgaattaaggcgtaaatggcttttcgggctagtaggactgagtgccttactcttgactggttgcgtaaccattcccgatgccataaaaggcaccacggctacgccacagcaaaaccttaatgcggtacgtaatgcgccgcaggtttttgccggtcaggaggcgcgttttggcggcacggtcgtcaatgtggttaacgaaaaacaacgcactcgtctggagattgccagcgtgccgttggattcaggcgccagacctattctcggtgaaccgtctcaagggcgagtgattgcctatgtggatggtttcctcgatccggtagatttccgtggtcatctggtgacggtcgtcgggccaattgtcggcagcgaggcgggcaaaattggtatgacgccctataacttcgtggtaattaacgccaccggttataagcgctggaatattgcccagcaggtgatgatgccaccagcgccaatggggccttggggcttccgcggtcatcctgggtgggggccaggctggggttggtatgataccgggccagcgcagattcagactattgtaactgaatagcgttgctgaaacggtaggccagttagccagccgttgccaatataataatatagagaagggtgttgagcgatcgacacctttttttattgttttaatccgacaattagggcgctaaatcatcctctgctcggataactccccgttactgccccacatatttgactgttatctcgcgagagtgaacgctgttaggttcaaaaaatgaccctgattcaggggatagggcgcatcattgccacccggtcagccatgccgctcgcgacttcttccgtcagtattttcgtcagccaaggcggcgtattacgtgaattcaggcgaataaaaccgaatttggtatagagcgcaacgctttgagcaaaacggctaaaggtcgtcagatacagcgcggtagcgccgcgatctcgcagacgatcaatgactgccgccaataattggctgccaataccttgtccaccgtgctggggtacaacatcaatttcccccagtaaagccctctgatccacccagtacactaaagcgaaacccacgggagtcccgcttctgtctttcgctatccacaggcgtttttctcgctgcgctgtcactaattcaatcagcggcagcgtttctgtttttagatcatcaggcaacaagtgtgcagggaaaagttcggctgcctgttgctcaatacttgccaaaaacggcagatgttgctttttagcagactcaatctgatattcggtcattgtatccactcgttaacattagagtgatagcttaaccgccaatgaagagtcgcataaggtttttttgataaatggataaaaactatgtgtgctatttaatcgatttgttgaaattatcaccgggtaatcatttccagctcagctttagattataaactgacttaaacggtgtataatcaaagagttacaatcattataattatgaatttatataacgcattgattttatttatattaatgaggcggcgatggccgccttgtttttttgttgagatacatgaaaaaaattagtgatgtacttctcaacctcaaaattgtttaaaagcaaactggtacgctgagttaaaatattgttaaagtcctgaggtggatttgggtgaagatatgataatcaacaatgatttcaggagtgctaccttggaaaaagcatggctaaaacgttacccggcggatgttccagcggaaattgatccggatcgttactcttctctggtggaaatgtttgagaatgcggcgctgcgttatgcggatcagcctgcatttatcaacatgggtgaagtcatgactttccgtaaattggaagagcgtagccgcgcttttgctgcctatttgcaaaatggtttggggttgaagaagggcgaccgcgtggcgttgatgatgccgaacctgttgcagtatcccatagctttgtttggtattttacgggctggaatggtggtggtgaacgtcaatccgctgtacacgccccgcgagctggaacaccaactgaacgacagcggcgcagcagcaatcgtgattgtttccaattttgctcatacattggaaaaagttgtcttcaacacacagattaaacacgttattttgacccgcatgggcgatcagctttccgcagcgaaaggcacattggtcaactttgtggtgaaatatatcaagcgtttggtgccgaaatatcacttacctgacgccatttctttccgtaccgtattgcaaaaaggccgtcgcctgcaatatgtcaaaccggacgtgctcaataccgatttggctttcctgcaatacactggtggcactaccggcgtggctaaaggcgcgatgctaacccaccggaatatgcaatctaaccttgaacaggctaaagcggcctatgcgccgttgctacagcctgggcaagatttagtggtaacggcgttgccgctgtaccacatctttgctctgacgatgaactgcctgctatttatcgagctgggcgggcgcagcctgttaatcaccaatcctcgagatattccgggaacggtgaaagagctcagccgttatccctttaccgcgatgaccggggtgaataccttgtttaacgcgttactgaataacgaagaattcaacaaacttgatttttccactttgcgactttctgtcggaggggggatgccggtacagaaagccgttgcggaaaaatgggaaaaactgacgggcaggcacttgctggagggctacggcctgacggagtgttcacctttggtcacaggtaatccctatgatttaaaacattacagtggcagtattggtctgccggtgccttctaccgatgttcgcctgattgatgataacgggcaggatgttgaaaccggtatgccgggggaactatgggtgcgcgggccgcaagttatgttaggctactggcagcggccggaagccactgacgaagtcttaaaagacggttggttggccaccggagatattgccactatcgatgatatcggcttcttgcgtattgtcgatcgtaaaaaagatatgattctggtttctggattcaacgtttatcctaatgaaatcgaagatgtggtagcgttgcaccctaaagtgctggagtctgcggtgatcggtgtgcctaatgaggtttccggcgaaacggtgaaagttttcgtggtaagaaaagacccgtctctgagccgagacgaattgctgacccattgccgccgctatcttaccggttataaagtaccgaaaattgtcgagttccgtgacgaattgccgaaatcaaacgtaggcaaaatattgcgcagagaactgcgtgatgaacctgttaaggagagtagcaaaaacgctgcttaataggcttcgttacaggctcatcatcaacaacgccggtcaataccggcgttgttgtgtctgtcataggctaacgaccaagagaatgatgttttgaattatcagttgatcactaccgacgctgcgttgcagcaagtctgcgagcaagctcgtaaccatacccaggtggctttggatacagaatttgtcagaacgcgtacctactatcctcagttgggcctgattcaactgtttgacggtgaacaactttcactgatcgaccctttgccgatcaccgaatggcagccctttcgcgagttgctgaaagacgagtcggtggtgaagtttctgcacgcgggcagtgaagatcttgaagtctttcttaatgcatttcagcaattacctacgccaatgattgatactcaggtattagctgcctttacgggtaaaacgctttcctgcggttttgcgacgctggtggcagaactggaaggcgtcgaattggataaaagtgagtcccgcaccgattggctggctcgtccattaactgagaaacagtgcgattatgcggcggccgatgttttctatctattgcctatggcaaaaaagctggtggatgccacactggcggcggggcgtatggatgccgcgcaggacgaatgcctgctgctgtgtcgccgtcgcagtgaaacggtagatcctgagctggcttatcgtgagataactaacgcctggcagttacgaggtcgtcagttggcatgtttgcaaaaactggcgtcgtggcgtttacgtcaggcgcgcgagcgtgatttggcggtcaactttgtggtcagagaggaaaatctgtggcaggttgctcgctatcaacctacgtcactcggtgaactggattctctgggcttaagcggtcaggaaattcgctaccacgggcgcactttgctggcgctggtggctgaaggtaatgcagtgccggaagatcagttgccacctttggtcgccaaccttatcgaccagccgggttacaaaaaagtctttaaagatattaaagcattgattcaggcagtgagcgagcgcagtggattaagcagtgagcttttggcttcacgtcggcaaattaatcagttattgaattggcattggaaactcaagccgattgaaattcgtcctgagttattagccggatggcgcggtgatttgttaggtagtgaattggaagaaatacttaaacagtattaatcctatttaagggcaggggaactctcttctgctctgaatattttatacgcggtaggattttatttatttagcggtatcaataatccatcaagctattaagacttttttttgccagaaatgacgaaactcatttccgcagtaacttcttttcactgtgtttatatacagccaggaaaactcaattaccccctgtaaataaatacagggggtaattaatgcgacgatgtcatttaggtgtttcttccgtttccggtaatgtcacgttaagttctaacaccgaaatatcgtcacctttctgctcaaactgaacgtgtagcatttccggatcgatctgaatatatttacaaatcaccgccaatatatcgcgcttaagatcaggcaaataatggggctcactgtccccacgacgacgctcagcgacgataatttgcagccgttccttggctatattggctgtcggttttttgcgggacagaaaaaagtctaacaaggccatggtttatcccccaaaaaggcgtttcaggaagcccttcttctcttcttcaatgaagcggaatgggcgttcttctcctagtaaacgatcaacggtatcgtcatatgctttacccgcatctgactctttatccagaataaccggctcgccttggttagaagcgcgcaatacggattggtcttctgggataacgccaaccagcgggatcctaaggatttccaggacgtcctccatgctcagcatgtcaccgcgactcacccggcctgggttataacgggtcagcagcaggtgttctttaatcggctcttcgccacgttcggcacgacgagattttgaggataaaatacccaaaatacggtcggaatcgcgaacggaagagacttccgggttagtggtaatgactgcttcatcggcaaagtaaagggccattaacgccccgctttcgataccggcaggagaatcacaaaccacaaagtcaaaattcatatcgccaaggtcgttcaggattttctcaacgccttcaacggtcagagcatctttatcacgagtttgtgatgcgggtagaatatagagattatccgtgcgtttatcttttatcagcgcctgattcagggtggcatcaccttgaatgacgttaacaaaatcataaacaactcgacgctcacatcccataatcaaatcaaggttacgcaggccgatatcaaaatcgatgaccacggttttcttacctttttgggccaagccggtcgcaatggccgcacttgaagtggtcttgccaacgccccctttacccgatgtaacaacaataatgcgtgccatgaaatggattccttgttaaaagggcttaatttagaggttgtatggttaaagcattatccaacagatgaagacgtgcggcctggccaaaataatcgcttggaatctggtcacttaaccaatattgccctgcaatagagactagctcagcgctcagatgtgtgcaaaaaatctgacactgagcatcgccagaagcgccagctaaagcacgccctcgcatcattccatagatatgaatattgccgtctgcaataagttctgcaccggcactgacactgctgataacaatcaaatcacaattacgggcataaatctgttggccggaacggacaggagtattaatgatacgcgtcttaacgggggcattttccggtgggcttactggctcgggagccatcttttggcctttaccttcattcagtaatggcaaacccgctcgagcaatcgcacgtttttgtcgttcatcccgacagccgctgacgccaacaatacgaaggcccgctgaagtgacagcctgctgaacatctctgaagttagcatcgttaggtaacgtagcaacattaagaacaacaggggcgtttttcagaaaagcgggagcttgttccactttttcctgcaaagcctgacgaattacctccggctgtgcatgatgtaaatgcactaccgatagggtaaaactactgccttttaactcaattggcgattgtgacatctatcctgactcagtttcagctacgttaaatccccggaataccattcggggtacgatattccgatgtacctatgcatgttataggtaatataaagataaatctatccgtatcaatatatcgaaacccttcagcaacatttattaaaattcgattggaaattacagcacaactttggcgtattcgctagcccacctcggctatatatctctgttactggtcgttttatgtgataattgatccggtaccaaatcaaattcaccggtgtttgtcttgtatgtaaaatagacagaaagtaatgtggctgagtcagttctgtctatttatcccattgatgttttttcaatagaagtttttccggttgtattttagtgataataaaatcttcaattcatataatttcagatcaatctgagcatttattgtcagccttgagtccaatagcgagttaattgggcgaattatctgcgataaagatcacagttcgccgacgtagatctcggacgtggtgatggagcgggtttggggaaatgaaactgccgtgactgatagcgagtttagtgctggcaggcatggcgcttctccgccttttccactttagatgaagcagtgcgcccactaaagatagcgacgagatccctattatttaaggattagtgagtaatagccggtaatagagagtggtagtcttgaaattatcaccacgcgttggattaggagagaataatgaagggaatctatctttacttaattctgttcagcggagtcgcttatatccctgttaatgccaatgtgagtgatttggcaagctacgagcggggattacaactcttgggcgaatgggagggggacagagaaaggggtatcggcgctttctctgcgatgactctcccttcattgaagacggttgcccggtggatgcgggattgccactacaacataatggaacagaaaaatcgtttcttataacaattgaaacccgtctatgtagccataggctgagttcggtgacgtttaattatctgggaatattgccaattttcagcaacccaatgtggttatccaccgtgtaaaaaagcaacggcaaccctgatttgacggccgctggctcaagggctaaagtcactttttctgatacaggcgtggtatagtccacggcttatacaggacgttattgaccacttgagtagagctaaaaacatgcattgtgtgatttatcgaagccctaaacgggatcaaacttacctctatattgaaaaaaaagacgatttctcccgggttcctcctgaattactggccagctttggtcaaccccagttttccatgatgttgtctctttcagagcgaaaaaaattggctaccgcagatattgagaaagtaaaaactgcgttgattgagcagggtttctatctgcaagttccgccaccgccagaaagcctgctaaaaatgcatttagggacggataaagcctaattctccaccccgatgagaagcccggatgccagcctttgctgcgccgggtatttcgcaggttttttccccctatcggattaaattgattggctgcctcaaagtattgccagtaaataaccaaaggaagtgggtgatgagggtttcgttactgacaatgttgttcgcttcggccgttttgagtggcgggttacattcggctacagctgctccggcagtgacgccagattcggcgaaggtcgcaaataggtcgacaaccgtcaccacgccggcgcagcaaggccgcgatcccgctgaattccacgcttatgtcgaacaacttaaaatccaggctcgctcacagggaatcactcaggcgaccttagatcaggcgtttgctgacattcattttgttgaccgagtgatcaaatccgatcgcaatcagttagaaaagaaagtgacgttggatgattatctacagcggacattgcccgcgcagaaaatcaaacagggaaaactgtttcatcgccgttataaacctcagttagcccgagctagcgcccgctacggagtacctgagcgctatattgtggcgctatggggaatggaaagtggcttcggtaaaattcaggggaaagaggatgtcatttcggcgctagctacactcgcttttgaagggcggcgcgaagcattttttaccaaggaactcatggctgccctgaatattattcagcaagggcatgtcggtaaccaaaagctaaaaggttcctgggccggagccatggggcagaatcagtttatgccatcctctttcctgaattatgcggttgatggcgacgatgacggaaagatcgatatttggaccaacgtcgatgatgtttttgcctcaacggccaattatctgtctaaagaaggctggaaaacaggggaaagctgggggcgggaggttctgttgccggcgaatttcaaatcgcaatatgtgggtttgaaaaatgagcaggtgcgcactttggctgagtggcagcgaatgggcgtattaccgctgaataaaaaggcgttcagttatcctgcattacgagcctgggttattacaccagataatatgcaaggtcgaacattcctagtttatgataactttagaactatcatgcattggaatcgctcttactatttcgcactcagtataggtatgatggctgatggtattgtacgttagcagagcgaaatattgatgacccgattgggattaactgtcgatgtactctagagtttatctgtagatgatttcaggagaagcaacatgtatcaacatagagactggcagggagccttacttgatttcccggtaaataaagtggtgtgcgtcggcagcaattatgcagatcatattaaagaaatgggcagcgcagtacccgttgagccagtgttgtttattaaacctgaaaccgcgctgtgcgatattcgtcaaccggttgctattccaaaagggttgggcggcgttcatcacgaagtggaattggcggtattaattggaaccccactaaaacaggccaatgaagatcgggttgctcgcgcaatagccggttacggtgtagcgctggatttaacgctgcgtgacttgcaaatgggttttaaaaaagccggtcaaccgtgggagaaagccaaagcttttgacggttcttgccctatatccggttttattcctgtggcagagtttggtgacgcgcaacatgccgaactgtctttaatgatcaacggtgaagttcgccaacggggcaataccgaagatatgattacgccaattctgcctctgattagttatattacgcgtttctttaccctgcgagccggagatattgtgctgacgggaacgccgcagggcgtagggccgctaaattcaggggatatgttacaaattgctctgaatgataaaaggctaaacactcgtattatctaatgatttgctcgctgccccggcccgcttggggtggcgaggcttgcatcttcgctctaaagcgtctataacgacccgccatcacttacttacaccggataccgatatgtcacaacttcctttttggcaacaaaaaacgctggccgaaatgtcagacgcagaatgggaatctctgtgcgacggctgcggtcaatgttgtttaaacaaactgattgacgaagacaccgacgaaatatatttcactaatgttgcctgcaatcagctaaatatcaaaacctgtcaatgccgtaactatgagcgtcgctttgaatatgaagaagactgcatcaaattaacccgcgaaaatctggtgacctttgattggcttccgcatacctgcgcctatcgattggtgggtgagggcaaacaattacccgattggcatccgctattaaccggttccaaagccgcaatgcacggtgaacgtatttctgtacgccatattgccgtgcgtgaaagcgaagttatcgactggcaggaccatattttaaataagcctagctgggccaggtagtcaattgatgaaaagaattgttttcttttaaaaaaccgggtgcgccagtggtttattgtcattaaaatccaaggttattatcatatatagatctaggttatttcttcttgctgcgtagccatcgtgaggaggggggtagccttatcattgcttgttttcactcatcatttgaaatgcacttcttattggtctttattatatttatacaaaaataaaacttgcgtttgatattttcccattaaagtaacaatattcactttaagtttaagtttaagtttaagtttaagtttaagtttaagtttaagtttaagtttaagtttaagtttaagtttaaagcttaatgataaatttaatgtgagtacagcggtggttcatgattactgctcctgaggtgaaacggtatggtatgcctttcatgatgcaaagttcgaaaaatgaaaatattctaattggtgtggatcaagcggaaaatattgccagccagccagccagccagtgggttgagtaccaacacggcggccatcccggtgaagctgctaagggattttttctaacgttcaaactcaggctaatcaacttaagatcaaggtaataggtatttgggtaagaataaattaggagtaaatgtatgctccatagaacgagagtttttaaactgcaaggatctcgtcaggcatctttttctggtgttggtcacaatattttggggcaaatagcaaaggcggctttatctctctatcgtattgtgaaaccaccagtcggcaaggtcgatgctgacatataaaaatatgattcttatcaggcaataaaatgttatttaggggcgtaactatctactgattaattcatcgaatatcattcgcaactagtatttggtaaattttaaatgagattttttatttgtcactatatgtgagggtcagtaggttcaacacgattcaacaaatcaaacattgtttaattcgagaatattcccctgttatttctgtgtggaaaccgcaggggaagtcataatatcgttagctgctatttaagagttatactgggctaaaattattcgcgttgcttcagccagaacatcccgtcgtgattctgcatctttcttatgttgggtaaaatatactgcgagaattaacggtgctcccgttggcggccaaagtacggccacgtcattggttgtcccgtaatcaccgctgccggttttatcacccacgagccagtctgctggaacaccggcgcgaatgctggcatttcccgtagtatttccttttaaccattgagccaactgttgctgctgggctggcgctaatccatcgccgaactgtatttttttcactaacgccgccattgagcttggcgttgtggtatcacgaggatcaccaggaatagcgctgtttaattcaggttcccagcgatccagacgaaatgcagtatctccgaggctctgggtaaacttattcacaccttctaatccgccaagttgctgaattaataaattcgcagcagtgttatcgctatattgcagcgctgcggcgcaaagtgcagctatcgtcatgccttttcccaaattttcgcgagctatcggcgcataggaaagcaggtcggcctcagaatacgtgatatgtttttccagcaaagcaggttgagacatactttggcgcaatattgctgccgccagtaccagcttaaaggtgctacagaatgggaaagcttcattgccacgatattgaagttctttaccgctttggatattaatcagcgaaacgcccaaacgaccttgagctttttcctcaagggctgtcaattgttcagataatggctggccggcagatttcgcccatgaggggaatgccagattggccaatggaagggtgatacctgcaagtagcagcgagcgccgcagcgttgaatgcttcatagtcgtctcttatgcaatgtgaatctggggttctgagcaataaactctgctcgtctctgtttgaccgcaaaatgagagcggctccgagttactcaagattcggtgaaataagagaacaaaaagaccaggattgccacggcgatcataatcatggttgtacgtctcattttagcgctccaatgtgttgttcaatctaaaggtgaatgaacatggcgactattctacgtctgcccaggtaaaaaccctagtccgttaggggagcgggaatcgacagcatcaggatattgatttaatgcaattaaaccagtgacattttttacctgcttgactggatatgacataatgcaggtaagattaaaatgataagttgaatgccatgaaaaaaaataaattagtgttgtttaccttcggattagcgatggtcataggtacattctctgcctcagtattggcatctccgctgatgcgtttacagtgtttaactgaatcggggttaaagtcagagagtttgctggatggccttaaccaacaactaaccattgacggtgctattttcaaattcaccgaaattaaaaatgacgccaatggcgaacgtctgctttttcaacgtactgttgataacagcacttttcacgctgcgttgaatatctccaccacgcctatttatctagatttgaacaacggtgagaaaacattgaatttcacctgtaaaagtcttaaggcctaagttttactgcaagtgataccgttagagtcttacgttttctctgtgtagaaagggtaagcagcccctgttccccatacaggggctgtcgttataacgattaataaacggtttgattccttccagcgtttttggccttatagagattattatctgcggcttttagtagcgaatctaatgttggtgtatccgtacttagctgttttagcccaaatgaaagggtgagtttaatattatccccgcttgctggagtgaaaattgtctcttcgacctctttcctgattttttcaattcgctgataagcgttctccacatgacagttgaaaaagaccatggcaaactcctcaccgccaatgcgtatcaccatatctgattttcggctattctttttgaacatattagccaactcgcaaagtataaagtcacccacaggatgcccgtaggtatcattgatcttcttaaaatgatcgatatcgccggcagccagagtaatgggtttgttcagcgagtggatgaccttccaatctttcgctaatttacgccgattgaataaatgtgttaacgggtctatattagcttctctaattgctctcttattggttataatctgtttgaatataatgaccaaataggtcagttgcagaagtaagctgaatccaagcccaaaacagaataatatcttggcgcttttatctacctccgagatggccattttcgcctcggataactgctcactgctgtatttcaagagtcgcatgtttcggagttcaaaatcgataaaatggctaagtgcatcgttgaaaagaatatttctcgcttcattaatatatccgttttgatacagcgaaactgctttttcacttaggctaatataacgcagccaggcatgatacgcctcgtcaagatcctgcctgttattgctctctggcaaggttttactatacatatagaaagtattttctattcttattattaactcatttgtttctttccgtacctcctcaacagctttatcatcgtgagcattaaccagttgaagctgcaactgccttaattgcacggtatcagtaataaagctcctgcaggccgtaagtgctggtatagttttatccgtcagttcggccgttctggcaccgaaccgggcggtatcttttagcaggttattacccatatagaggtaaagaatattcacaatcacaatgacaataaatacagatatggcgaccccatttttttttgaggcaagacatcttaatctcccagtgttttcctgtttataaagttgtcataacgcacttatatagcctggttagtcttactggtaggtaatggcagtttttttgtcgctgataatagttaaatagataagtttagtccaaaattttttacttcatttcatttttaacggaacttatattgacgggtaggttattaatgtacttgattctggctatttctctgagattggataattatagctattatgcaaataaaaaaaggtgcctttcagcacctttttaagattaggagtttgttatttatcggccaaacaggtcacgtcttttcggcttaacaaattgactaataagaaccagaatagcaaccacaaggtaggcggaaaatataacgactagccactgaggcatctcaagagataagaattgccactgtctcactgagcaatcgccactggccaggaatacagaaggcagccatttgtctagtggcaaccaagacgggaaattaacaaagaaatcgcaggtggcaaatggggaagggtgaagttggaacatggtatgttcccacgctaattgcacgcccttccaggcactgtatatccacaatgcaatcgctaaatagcgtaatggcgatttgggcgcaatagcgccaagcagcgaagcaccaagaataccaaacaacgcacagcgttcataaatgcacattacacatggctgtaatagcatgatgtgttgaaaatagagtgcggccagctcaagcagaagtgcagtcaaagccattaaaagccaagcaccgcgcccttgggagcaacggttaagaaattgcaacatatctttatattccatgcagtaagcaattgtagtggcagtgtaaaccaattcatcattgctgccagctatccggcgacaagtttaagcgaaaatcatctgtttatcgcttagaccacgatttaacggataaaaattcatctttgatgatgttaatggcattttaagccagccctttagtataaaagtgtagggctggctgaggtcagaatgcaaggaatcagtgtgtaaccagtgcgcctgggtcaatttgcggcacggctatcaggcccgattgaatcattaattcggtcataggaactaatgcaaactcaacgcatagaagaccaaccaacgtcatgacaatggtatagggcagtgccatatacaccattcttccgtaggataaacgaataagcggagccagcgcggaagtcagcaggaataagaatgcggcctgtccgttaggcgtagcaacggaaggtaaattggtgccggtattaatggccaccgccagtagttcgaactgctgtagggaaataacaccctgttcgaaggcgctacgagcctcgttaatataaacggtgccgacaaaaacattatcagatacggaagagagcaaaccgttaaacagataaaacagcgacagttgcgccgatggcgacgactgtaggacaaactggataatcggcgtaaacagatgctgttcaatgattaccgccaccacggcaaaaaataccgtcaataacgcggtaaaaggcaaggcttcctgaaatgctttgcccagtgcatgttcgttggtaacgccgcacaacgacgtggccagaataataacggacaatccaatcagacccacttcagccaaatgtaatgccaacgctacaaccaaccaaacgccaattaacgcctgaatgattaatttcattttttcctgacgcgtgcgtttggcggaggtttgctgatcgtattctttcaaaatctggcgcacacgatccggcaattctgcaccgtagccgaacagtttaaaacgctcaaccagcagacagaccaataaaccgcaaacaaatacaggcaaagtgaccggaagcatgcgaataaagaaatcgaagaaatgccagccagcgcttttggcaatgatcagattttgtggttcgccaaccatcgtcattacgccacccagcgcagtaccgacaccggcatgcatcatcaggctgcgtaaaaaggcgcggaactgctccagtgtcttacggttttcctgcgaatctatccagctgtcatcgttgacgtccttatcgctatgattggaggcaacgtggtgataaatagtataaaaaccgacggatacgctgataaccacggcgataaccgttagtgcatcgagaaatgcagagaggaaggcggaggccagacagaaagccaaagacagaatgattttcgaccgaatattcagcagcagcttggtaaagacaaataacagcagctgtttcataaaatagataccggccaccataaagattaatagcagcagcacttcgagattattagcaatttcctccgcaacctgatgcggactggtcatcccaataataattgcttgaatcgccaataaaccgccaggctgcaacgggtagcattttaacgccatcgctaaggtaaaaataaactcaacgaccagcatccatcccgcgacaaagggactgacgaagaaaaagacgagagggtttattatcagaaaaccgataatggctattttgtaccagtctggtgagttgcccagaaagttcttgattagagcctgtcgattggtcatatccattgtgtgtcattatccccttaatttttctatggttcagttaataatcaagcttacggcgtgctttgagcaagcgatttaaagagtgtaaaaatatgactagtagcgtgaagttggcgcgatttttgccattttatgaccgctttcaccaattgttctgctgcgacgctatatcatacacggcgcgtctggtatgataagctctattaaattgctgaaaaatatcgctacggaacgtcacacacatggttataaaggcgcaaagtcctgccggtttcgcggaagagtacattattgaaagtatttggaataatcgcttccctccaggatctattttgcccgcggagcgtgaactttcagaactcatcggggtaaccagaacgaccttgcgggaagtattgcaacgtcttgctcgcgatggctggctcaccattcagcatggtaagcctacaaaagtaaacaatttttgggagacgtcgggccttaatattcttgaaacactggctcgcctggaccacgatagcgtccctcaattgatagataatttactcgctgttcgaaccaatatcgcttcgatttttgtgcggactgcgttccgccaacatcccgatcaagcattggatatactggcgaaagcgtcagaggtagaagatcacgcagaagctttcactgctttggactacggcattttccgcggtctggcatttgcttccggtaatccgatttacgggctaatcctgaacggactaaaaggtctttatactcgcgttggtcgttattatttctctaacccggaagcccgtaagctagcgctgaacttttatagccagttagctagcctgtgcgaaaataaatcatacgaccaggttatggaatgtttgcgtaactacgggaaagaaagcggggcgatctggcacagtatgcaaggcacaatgccgagcgatctggctgaagcgcgccgctagaacggcaaatgacaatgaaaaagggccattaggccctttttactatctgataaacggtattctcgataaaaccgcatcagacgaaggcaaaggttacaatttgctttcacgtggtggcgtgctttccagcagttcggtgctgccatcctcattcaactgttcaatgtgtacgtcaaatccccagaggcgatggatatgtttcatcacttctcgacgacttttatccagcggagctcgatcctgcggaatatagcgtaaggtcagtgagcggtcgccgcgcaaattgacattccaaacctgaatatttggttcatggttactcagattgtattgagcagacagctcattgcgaatagcccgataaccctcttcattatgaatcgccgagatttccagataattatttttatcgtcatccagtacggtaaataaacgaaaatcgcgcatgactttgggcgacaaaaactggctaataaaactttcgtctttaaaatcacgcatggcgaaatgtaacgtatctaaccaatcagaaccggcaatacccgggaaccagtagcgatcttcttccgttggcgacatacagatgcgcttgatgtcctgaaacatggcaaaacccagcgcataagggtttatcccactgtaataagggctgttataggcgggttggtacaccacgttggtatgactgtgcaggaattccatcataaaccgatcgctgacccgaccttcgtcatacaggtggtttaaaatagtgtaatgccagaaagtggcccaaccttcattcatcacctgagtctgtttttgcggataaaaatattggctgattttgcgtacgatgcgcaggatttcccgctgccaggactccagtaatggggcatttttctccataaaatagagaatattttcctggggttcacttggatagcgtagcgcttcagcctgggtttcttctcgagcaatgcgcggcagggttttccatagggagttgacctggctttgcagatattcctcccgacttttctgccgagctttttcttcctgtagcgaaattttttgcgggcgtttataacggtcaacgccgtagttcatcagcgcatggcaggaatcgagcagtcgttccacttcttctacaccgtagcgttcttcacattcactgatgtaatggcgggcaaacagcaggtaatcgacaatggagctggcgtcagtccaggttcggaaaagatagttatttttaaagaaggaattatgcccatagcacgcgtgagccatgaccagtgcctgcatcgtaatggtgttttcttccatcagataggcgatgcaagggttggagttaatcactatttcataggccagaccctgctggccttgtttatatttctgttccgtttcgataaattttttgccaaacgaccaatgggtataatttattggcataccaatacttgaataagcatccatcatttgctcagaggtgatcacctcgatttgatgcggataggtatccaatcgataatgtttggcgacccgatcgatctgatcgaggtaaacctgtagtaattcgaaagtccagtctggtccgtcagtcagacgcttatcttgcgcgcccgttttttcagttgaagttgtcatcagcgcaccctcacggttttaacatctggccaaatacctgtcccttgcataatcctagctcaatctgaacaaactgaagcacggcaagaccttatgtcaatatagtttatttttgccgcgctgggagcatcatcttattcttctatttggcaatattttattctgcattaatggcaatttataagaattaaatatcgtcaaagtcatcttggtcaagttgtggattatttggactataaacagctaacttaatgaatttattgagatatatacctgtttatgatgttcaaaccgaatcttatcgccaataatgtaaatcacttgaaaaacaataagattaaaatataaaataactgtgagcagaatcacaacccacgatcaaattgttggctagttttttacactaagttaattttctgtcagcagaatattatgctttatgtattatcggcggagttaaggtatgcgtattatcattttgggaagtggagtggtgggggtggccagcgcctggtacctggcaaaagcaggcaatgaggtaacggtcattgaccgccaatctggcccggctcaggaaaccagcgcaggtaacgcggggcaaatttcccccggctatgccgcgccttgggcagctccgggcgtaccgttgaaagccattaaatggatgttccaacgccatgctccgctggccatccgattagatggcagcagcttccagttacgctggatgtggcagatgctgaaaaattgtagtacttcccattatatgaccaataaaagccgcatggttcggctggccgaatacagtcgggattgcctgaaagatctgcgcgaagataccggaatccaatacgaaggccgtcagggtggaaccttgcaattgttccggactcagcaacagtttgataatgctgcaaaagatatggcggtattggaggatgcgggcgtaccttatcaattattaaccgctgataaattagcgaccatagagccagccttgtccaaagtgtctcataaactgaccggcggattacgtttacctaacgacgaaaccggcgattgccgtttatttaccgagcaattggcgaaaatggctgaagccgccggagtgaaatttatttttaaccgctcggtagataaattgctggtggacggtaatcaaatcgctggtgtactttgcggcaatgacgtgatcaagggagatgcttatgtcgtggcatttggctcttattccacgtcattactacagggtttagtgtctattccggtatatccgctaaagggttactcgctgactattccaattaccgatccggattctgcgccattttctaccgtgttggatgaaacttataagattgcaattacccgatttgacgatcgtattcgcgtcggtggtatggcggagattgtgggttttaatacccaattggaacaggcccgtcgggaaacgctggaaatggtggtgcaggatttgtatccggatgggggcaaagttgaacacgccacattctggaccgggttgcgtccaatgacgcctgacggtacgccggtggtagggcggacgacgctgaaaaatctctatctgaataccggccacggcactctgggctggacaatggcctgcggctcagggcaactactggccgatatcatttctggccgtcagaccgccattgacgccgatgatttagcggttgctcgttatagtccgggattccattccgcgaatcatggcagtctgtacgcggcgcgttcgattcgctaattttcaaatattgcacaacaagcggctgggtaatatcggcctcttgatgtgcgcgttatttcatagaataaataatccggtaacaattaaaagcccgacaaacccggtaaagtaaaaaggaacgcgcatgcctcgcccgatatctgccacgctgcatttgtctgcctttgataataatcttaatgtcatcagaaattgtgctcctcagtcaaaagtatggtcagtggttaaagccaatgcttacggtcacggcctgagcagagtgtgggaaagtttatccgctaccgatgggtttgcattattggatctcaatgaagcagtcttactgcgtgagaagggttggaaagggccaattctattgctggaagggttctttcaaccgcaggatttgacgttgttggatcattatcgtctgacgacgacgatacacagtgattggcaattagacgctattcaacgagcgcggttaagtgcaccacttaatgtttatcttaaactgaacagcggaatgaaccgcttaggttttccggttcgtcaggctgagacggtctggcaatgggcgaaaagcattgccaatatcgatcaaattacgttaatgagtcattttgctaatgcggataatcctaccggcgtggcgcagcagtttaatgacatcagcgatgccagtgccaatattcctgctccgcgcagttttgccaattccgccgcgacgctttggcacagtcaaactcatcgagattgggtacggccgggtattattttatacggggcgtccccgagtggtaggacggcagatattgcggacaccggtttgcaaccgacaatgagtttgtgtagtgaaatcatcgccgttcaggatttgagcaagggccatggcgtgggctatggcagccgctatcaggccagcgatgctcagcgtattggcgtcgtggcttgcggctatgccgacggctatccgcgtcatgcgccaacgggtactccggcatgggttgagggcgttatgactcgaaccttgggcactatatcaatggatatgatgatggtggatttaaccctttgtccacaggccgtaacaggtagcaaggttgaattgtgggggaaaaatctgccgattgacgacgttgccgccgctgcgggaaccgtgggctacgaattgatgtgcgctttggctcccagagtgccggtgaaaatcgagagttaagcttgaaaattccgatattccgaaacctatcctgaaggcgtatctttatccagatatgccttctttattttgatctcatttcattaatttgttgatatggcgacatgtgaatagtggttataaaacccatttatatcgttattctcccttcggtttttattattgccacctcatctgatttatttatagtggttgaactgctgatcatccgcatgattttatattctgagaataaatgaaatcgaataggagagtattatgtcagttgccagaatagattcactccagttgagaatgaatcagacaagaatactcatcctgtcattaatatctatctctcagctcatgctttgtctgtattcaatattatcactgcggtagcatcggggtttgattgtttattttcaatactagggaaaactattgttgatcaatattatcgacgatctttctatcggctaaccgagacagttttagcgaggaaatatgatgcgccaactcgtgggtctgattacctctgatttatcccgtatggcgcacagccgcgcatgggaaacgctggagcgtaacatggcagccgatgattttcggctggatagcaaggtgaaaaataccaaagaaacctccggtgagttgatgattatcagaacgggtgccgaagccattgtatttccctctggcgttaatgtattaattgaaaatgcagattatctattttattgcttgctccatccgataactcagctatggatgaaaaacaggcggcctgacggttacgatctcaatgttctgtataataatagccaatcccgctatatcatttatatgcagatgaccgaagccatgttgtattacgtacgccgggggtatcgggtcttggttatctatcattgcgatccaaaggccaccgatccagcagtccagtgcgctatttcactggcgcgacgggagcggcatcgagttacgttgcggactatcggtggtgtaatagagccaaaccaggaagaacagcaatatcgggcgggtctcatatccgcgtcagataaccgcgggtttatctatgcgctattcactcgtaagaaagtcatgatggctgttatccattacctattaaataggtctcagccaaactgcgacagaataatctcagtcttggcggattattgcatcgactggaatcgctttattccagatatcgatcatcagattgatacttatttatatccgtggaatggcgtttattgcagtgaagcgccccgaactctattttgcctgctggcttcggttggtacgaataaaggttgtctattagagattaacgggcaccgagttcgtcatttacgttatcgcttcgggacgttgagttgggctgcgggagcagaaaatcctcatcatggctatttgcattttgactggcaggcacaggggcggaggatagtaggatactgttggagaacgggacaacgcagcctagagggtcaacgtattgtcgctttttctgccactctggagggacaggaaaaagtcgaagcaattttatcctgcgaaggacattgtcgcgaaatcattcgaaaattttcaagtggagaaaatgagcctagatttgatttgcctgactgggcgcaggaatttgtgcaaccaatgatacaaccgcgtccccaaggtggggaaagggtgttttgtcattattggcggaaagcagccttggcaaggctggcactgaggttattacaaagtaagtgctaacgtaggataaacattagggcagagtaaaataacggctgatttagcgggttatcaatgatcctctaagattaattatccataccatttattacccgacgagttcacgtcatccaactcattccgcgaaagcggatcgacagagcgatccgcaatcattatcaggcaattttcttgatgatggtcggcatccgcttgctggcactgcgggcaatccacgccaataaacagccggttaacatcaccaacgccagcgaaagcttaggctgaatgggtaatgacatagcgatcagacccaaggcggcaccgccggccatttgcacaaaaccgaccagagcagaggccacaccggcttcattggcgtaaggttccaaggcatagctggtcgccgggcccatcataaaggccagaccggcgcaggcactggcgaccggcaacatgtaagtcggccagctattctgcatttctgcacttaattgtgttaagccaaataataagcctacacaccccaaagccatgagcagactaccggtcatcagacaggctggacggcccactttttgaatgatcctattggcaaagaaactcacaaacataatccagaacccgttggcgccgaaagccagtgagaactggagcggtgtgagattagcctcgcccatcaatacgttaggagccagagacacataagtcagcgccattcccatcgcacccgcgttcaccagcgcaaagaccagaaaacgatcgtcacgcaaaatacgcaaatagtttttgaacggtaagcctttaaccgactgggttcccgctgggcgggtctctggtaggaaaaataccaccaatatcagtaccagaacggcgtatagcaccaagaaccagaagggggcgcgccagccgaaggcttcggctaacaggccgcctaacaaaggcgccagcgcagggacgatattcaaggtgccatttaaaaaaccaaaggctcgggcggcctcgttaccatttaaacgatcgcgcacgccgctaaatgccaccacggcggtgcaacatacggcggttccctgtagcaggcgcgaggcgacaaacatcgttggcgtagtcgctagcgctgccattgcggcacccagcatatacagcagaattccgatgatggcgataggtttgcggccatatttatccaccaatggacctgcgatcagttgcccgacgcccaaaaccagaataaacagcgctatggtggattgaattagtgattcgctgctattcaggcctttggcaatagcgggaatagtgggcaggtaaaggtcgatacccagtgggcctaatagaatcaggctgagtaataaaaacagaaatttttgcatagcagagataaaacgtccaggtgacagaagcggcaagaaacaggaatttggctgagaaagggggctacgtttcggcaacggcgtcacttgtctcagaaaaactcaacctggttagattactacaatcaatgaaatataacctgcaaatagttttaattgcacggtaattctggggaagcggtgcggggaaggattaccgcaccggattgataactctccttttatctacaaaccccgagattagctgatccaattaataacacttggcggggttacgatagcttaaccgaggatatcaccacaggttattttttgtactcacttatgattcgtagcatgtcacggtcggggagcaacttggggtctggatattgccgccaggcgtgcgtaccgccaaaggagcatcgcgggcgcgagtggttaaattgcgattgcggcagcaggtgccatttgccgtctattttaactctcggctgcttgccaggaatgtcataggcggggcgtgtatcgcagtttgcgtgtagcgtatcgtcgacgggcgcttgcatggccatatggctgatgcgatagcatttttcctgattaatcgcgacgcctcgacgttccacttcggcggttaagcgtaatacggatttaccgtcgttattataagtacccagcgcggagcataatgcatctgaatcaaattcagcgatctgtttgtcggtcaaatgaggaaggggaagtgagcaacccgaaatgaataaaaaagccagcggtaatacaactctcatgaaaaatcctgttccataagtcactacaaaaaatagtggtaaataatttcaatactaattaatagtccatttagaattaaccgtattgaaaagtgaggggctagtgtaagtgataataagcagatttattatattaattgccaatttagataaataaaggataaacagaggaaattaatttatggtagtggagtgagttaacccgcgttaggctgatgagtaaccccatcagcttgacgcgtgagcaatgacccattgttccatggcggaagcatccagcggttcggaaaacagatatccctgcccgatgagataaccctgacggctgagcaagttgcgttgcgcttcggtttccacgccttctaccacgacggagagttgcaggctttcaccaatgcggattaccgcttcgctaagcgttctgctggtttcatcgtgctccagatcgtttacgaaactcttatccagcttgatttcatctaattccagtcgacgtagatagctcaggctggaatagccggtgccaaagtcatccattgataacctgacgccctgcttatggatcttatgaagggtggcaaaaatactgggattattatcaatcagaatatcttcggtaatttccaaagttaaatcctgcggtggcagatggtagcgttgcagaatgtgggcgatgatatccggcagccctaaattatggaaattggttggtgataaattaacggaaatagacggtacatcaaggccacgcaggcgccattccgccaactgacgacaggcttcattaatagtccacagcgcgagttcattaattaacccgcattcttcggccaatggaataaaacgctgcggcgggatctccccaagcgttggatgatgccatcggcttaaggcttctacgccgtaaagttgactatcgtgaagtctgacctgtggctgataatagagctgcagggtattgagatgaaccgcttgacgcagcgcgccttccagcgcctgacgctgtaaatttagctggttcatttctctgctgaagaactggaactgtccacggcccatctctttagccttgtgcttggcagcatctgcattgtgcagcagcgtattgatttctttgccattatctggatacaggctaatacctattccggcagaaggaataatggtcaccccggcaatctggcagggctgtgacaggcaacccagcagtttctcgactcgtagcgtggttttatcaacgtcaaaagaggttagaatcaggacgaactcgtcccccgataaacggccaataatatcgtgtttggccatatccccgcgtaatcgttgggcaatggtacacagcaattcatctcccgcagcctgacccaatgaatcgtttacctgcttaaagcggtcgatatcaatcactaatacgaccagcgattgcccttgcgcttcagcttgactaattgcctgatgagcatggttgaggaactgggcgcgattaggcaggccggtcagtgagtcatacagcgccagttgctggattttcatccgtgactgttttctttccagcgccagcgcgcacaggttagtggacagtttgactaacttatggtggaaggcgttagggccgcgtttttcgcgaaagtagaaggcaaaagttcccagcacttctccctggctggataaaatagggctagaccaacaggctaataatccgagtggcagcaaaatatgacggaggcgacgacacaaagggtcgttggcgatatcgtccactaataccggttctttgcgataggctgcagtaccacaagagccgctgtgcgggccgatgggcacccgttgcagtgcgtcggtgtagtgtggtgacaaactgggagccgccaaatgctgtaaggtattatcatcccgcgcctgaagaatactcaccacgacttccggcgcaatgcgttcaatctcgagacaaaacatattcagcacttcatccagcgggcgctctaacactaaggattccaataccttatattgtagtacttcatatattttggtcggggtaatatccgtcagtacgccaatggtataactggctttcccctgttcgtcatagaccgaatttatggttgccgagcaccaatgaggctggccgtcctgactataaaacagttcttccggctgcaacgtttggtgaaggtcgtcggacgaagccgatatcgatgaggaaggcggtttattttgtaatagggcagcaatcggttgccccagtgcctgctgtgcgctgtaaccgaatagtttggtaaaaccctgattaatatacaaggttagctgaccgtcatcgctgccaccggcaataaacattgcgctatcgctgcggtcggtcagttcggtcagcagctgtacccattcatgggttgaggattccagcgccacctgctgagtgatatttttggcgattttgaccattttggcggttttaccgtcgcgacccggaaccggctgataaatcgcggcgagccataccggggagccgtctttatgtcgccgctcaaagcgaccttccagagactggccagcgcgcaggcttttacgcagggcgtgatactctttgctcccgataaaatcgggcttacagaacattttatgggactgtccgatgacttcgtcacgctgataaccaaagtaatcaaggtagttctggttaacattgactaccacgccgttaagatcgaattcgataatagccagagaaagatttaatgcttgcaacagcgcctcatgttcactgtacgcagacagatctttttcagtggggaaagggtcatttaaatggctcatgaggattcctgtagcaatagaagcgcctaggccgttgtatcattaaactaaaatcatcggatatgtaaatcaaatatcactatctatatagaaacagaataggataactgacaaagaaattaaatataataaagtcatttccccaaagaacagactttgtacaacgacaagtagatttttttaaatctgtttagcgtgtatttaacctaccttaggagagaaaccccatggtcataaagagtaaatatagtgcaatatttataaattaattagagtttttaatgcgtattcaatctgtcgctttttatcgactaattaaaagttaaatgaatgcttgttgtcgacagctaataacgcagaaaaaccggctaaaaagataaccattgtttgtaactcattaaattattgagtttttattacgttgatggaaagaataagccccgccagcgctaaaaaggccggcggggctgagatatcggccatcaaagattttaatggtcgatagagctgaaacgtccgccattaaaatctttaatggcatttttgatttcctgctcgctgttcataacaaaaggcccgtaaccgacaataggttcattgatcggttcgccgctgagcaataccaagacggcattattgttggcttcaatggtcagatggctgcccgctgaatccagcaagaccatttccgcttcgcgaccaatgctttcgccattcaccataatggtgccgtgcaagacgatcagtgcggtattccagccttccggcagagaaatttcactgacgctgccctgattcaaccgcatatcccaaacgttcagcggtgaaaaggttttggcaggcccggtatggccgtcgaactcaccggctatgacccgaacacgaccggcgttatccggcagttcaacgcgcggaatatcctgactcaggatcgcctgatatccaggtgcggccattttatctttggcaggcaggttcacccacagctgaaccatttccagcgggccaccgcttttactgaaggcttcggagtgaaactcttcgtgtaaaataccagagcctgcggtcatccattgcacatcgccgggcccgataacgccgcctttaccggttgagtcacgatgttggacttcaccttgatacacaatggtgacggtttcaaaaccgcgatgcggatgttgccctacgccacgcgggtgattgctcggtttaaaatcctgcggaccggcataatccagcagcaagaacggactcagctgcttgccatggctttgatacgaaaacagagaacgaaccgggaaaccgtccccaacccagtgggaacgtggcgcagtgtaaacacctagtacttttttcatcataatctccttacaacaggtaggttgctgtattggataaagtataggtttaggataatttaagcggtagatagcaaaatagcacatcactgtcctattaaatgaacaataaggtgactatgcaagatctcaacgatctttattactacgttcaggtggtcgatcacggtggttttagcgcagccgcgcgagtgctgggtatgcctaaatccaagctcagccgccgtttggcgctgcttgaggacagattgggcgttcgcttggtgcagcgttctacccgacgttttgcggtgacggagatcggccaaacctattatgagcactgtaaagccatgctggtggaggccaaagcggcgcaggagtctattgagttaacccgcgctgagccacgtggcgtggtcagagtcacctgtccggtggcgttgttgcaggcgaacgtgagccagatgctggcggattacatggccagttgccctcatgtgagcgtgcatttggaagccacgaatcgccgggttgatccggtggcggaagctattgatattgcgataagagtacggcctggaccgattgaggacagcgatttagtgatgcgggtgctggccgatcgttgccagagtctggttgccagcccggcgttgctggcgcagtgcgatgaaatccgatcaccggcagatctgaccggcatccccagtttaggattagggcaaccgcagcagaattttgtctggaatttgcaaggcccaaatgatgctcacgcggcggttaatcatcagcctcggtttattactgccgatatggtggcgttgcgctgtgccgcgctggctggcgttggcgtggtgcaattgccgctgatgatggtcagggagcaactagagagtggggcgttgattcgcctgctaccggattgggcacccaaaccggaaattattcatgcggtatttccgtctcgtcgcgggttgctgccttcggttcgtagcctattggacttcctcgccgaacgttttgcgcaaattcacgaaacataatcgccggattatccgccacgccgtagcaaattcaccatattcacgaccgcggtggagcgctcgtggcggcgccaggccagcgtaatctgggtttttagctggtcatcatcaatttcatggtaggtaacattgtttgcatgaatggttgttagtgaacgcggcactacggtgataccaaatccggctgagaccatgccgatggcggaaaccaactgtggcgattgttgccccagttctggctcaaatccggcgcgataacaggcgttcataatggcatcaaacaagccggggccaacttcccttgggaaggtgatcagcttttcatgctgtaaatcccgcaggctgattttggcacaatggtgcagaggatgattggcgggcagcaccagcaccatatcttcttccactagcacctcacaggtaaattcggtactggcgctacaaggctggcgaataaaagccacgtcaatgcgttcgctgtgtaaatcgttcatcagcaccggcatgatttcttcgctaggcaataaaatgaccgcgggaaaggtttctcgatagcggtgcaacaaggataaaaccgccggttggaaagcggtggagctggcaaatccaacccgtagttttcccgtttcccctcgggcgatgcttttggctcgctcaaccgcttcatccgtcaattgcaaaatatgaagggcgtcggcatagaaagcctcaccggcctccgtcagttcaactccccggcttaaccgatgtaacagcggcgtacctatctctcgttccagcttttgaatttgctgactcagcggcggttgcgagatgccgagcttttcagctgcccgggtaaagtgccgagtagaagcgacggcaacgaagtaacgcagataacgatgttccatatatttttgatatcaaaatagtgaggttcctatattggtacttatgtcgttctcgcgtcaaccttataactaaacataagtgtaatttatgttacagataagagggagagcgacatgattaaacaagatcacccagtatgttcatgtgcagagacgattgcgcagagcttcattgcccatcagaaagggcatccagagtgtgttttgtaccaaacctcattgatgagtgcgctaattagtggtgtttacgaaggcaatatcaccatgaagcagctgcttcagcacggtgactttggattaggaaccttcaacaatctcgatggggagttagtggcgttcaacagcgaaatttatcaattgcgttcggacggtagcgcccgtagcgcccagcctgagcagaaaacgcccttcgcagtgatgaccttcttccagccgacggaaaaacgttgttttgagcataaaatgagccgccagcagattcacaatgtgattgatgatgtgaccgagaccgataatctgttctgcgcattgcgtatcgatggcaagtttagccacgttgaaacccgcaccgtaccgcgtcagcagcgcccttataaacccatgctcgaagccattgccgaacagccgacgtttgaattcgagcatcgcagcggcgtgattatcggatttcgcagcccggcttatacccaaggcattaatgtcgcgggttaccacgagcattttattaccgatgaccgcagcggtggcggccatgtacttgattatcaactggaaaacggagagctgactttcggcacgttgaccaagctggtgattgatttaccgcaggacaatgacttcctgaaagcagatttgacgccgttgaatctcgatacagcgattcgcgcggtagaaagttaattccccctgatgggtaatgagagcggtaacaaaggacaacgtcatgagtcatgaaattgaaatgcaggaatggaaatgcggtgccgatctggtggtgaatcatctggagcaacaaggtgttaagcaggttttcggtattccgggcgcgaaaattgatcgggtatttgattcactggaagattctacgattgaaaccatagtggtacgccacgaagccaacgccgcttttatggctggagccattggccgtttaaccggtaaggccggcgtggcattggtgacttctggcccaggttgttcaaatctggtgaccgggctggccaccgcaacgtcggagggggatccggtggtcgctatcggcggtgcggtgaaacgggcggatagcctgaaaatcactcaccaaagcatggataccgtcagcattttccggccagtcaccaaatttagcgtggaagtgaccgccgcgagcgcattgccggaagttatgggaaacgccttcagaaccgcagagtttggtcgaccaggcgccgcctttgtgagcctaccgcaggatattattaatgagccggtaaccagccgtattctggctcatcagccttgcccggttaacgggagtgcgcggacggaagatatcgtcgacgttgcggcactgctcaataaggccaagaatcccatattgttactaggtttaatggcgagccaaccggccaacgccgaggcggtgcgacgcctgctgcgccatagccaactgccggttaccagcacttatcaggcggccggggttatcgatcaggtgcatttcgatcgttttgcgggtcgggttgggctgtttaataatcaggccggtgataagttactgcaacaggcggatgtaattctcaccgttggttatagcccggtggagtacgatccggcgctgtggaacagcggccacgctaccttaatccatctggatgtattaccggcggaaattgacattgcctatcaaccggaaaaagagctggtggggaatatagccaccacgctggatgagctgaccaaacggctgaacggttcgttaatcctgacctcacagaccgaggctgtgctggaagaacgcggtcgccagcgccgtgatttggccaaccgagccgaacgcatgaacggttttgctattcatcctttgagattagttcgtgcgatgcaggatattgttaacagtgacgtgacgctgtgcgtggatatggggagtttccatatctggattgcacgttatttgtatagtttccgtacgcggcagattttgatgtctaacggccagcaaaccatgggggtagccttaccctgggcgattgccgccgcgttggtaaatcctcatcaaaaagtggtgtcggtttctggggacggtggctttatgcaatccagcatggagctggaaacggcggtgcggttgaagagtaatttgttgcacattatttgggtggataatgggtataacatggttgaaatccaagagcagaaaaaataccaccgtccttccggcgtcagtttcggcccgatagatttcaaaatgtatgcggaatccttcggtgccaaaggttttgccgttgaatctgctgatgaattaaccgccaaactgcgtcaggctatggacgttgacggccccgccgtgatcgcgattccggtggattactcagataattaccgtttaatggaagagttaaatatcagtcaactgctgtaggtgaacgaggttagatccgctgattttcataggaataagcagggtagttacagcgttgaagagataaaaaaaccggctgatgtttggccggtttgtatttttctgatcaatcaactttcggcggtttgccggtggaacagttcccggaacacgggataaatgtcttccggttcgcgaatatgctgcatagcgaaattatcgaattgtgcttccaaagcctcgtattcccgccacagggtttgatgtgcgcggcgggtgatttctatatagctgtaataacgcaccagagggagcagctttttcgccagaatctcgcgacatagcggcgaatcatcagcccagttatcgccgtccgacgcctgagcggcataaatattccactgcaccgggtcataacgttcctgaataacttcatccattaactttaaggcgctggatacaatggtgccgccggtttcctgcgagtagaaaaactcctgttcgtcaacttccttagcctgcgtatggtggcgaatgtacaccacatctacgtttttatacgtccggctcaggaacagatacagcagaatatagaaacgtttagccatatccttggtcggttgatccattgagccggaaacgtccatcaggcagaacatcaccgcctgactggaaggttcaggacgacgttcatagtttctgtagcgtaaatcgaaggtatcaataaaaggaacccgttcgattttctgccgtaattcagcaatttcttttctcagacgctcttcttccagcaactgagccggttctgagttttccagtaaagctaattcttcttccaactgatgcatcaaccgccgtttacttgcggtcatcgcggtacgacgcgccagcgagttttgcagtgaacgcaccacgctgatattggccggaaccccatttgccgtgtaacccgcgcgatgtgttttaaattcagtcagctgtttatattggttctttttcaaattgggcagggcgagatcttcaaatagcagatccagatactcatctttggagatctgaaagacaaaatcatcttcgccttcaccatccttaccggcgtttccctgaccactgcccgatccgccgccaccttgctggcgttcaacccgatcgttagtcacaaaatggtcgttaccaggatgaacccggtgacgtgcgccaccgcgtccctgatgaaacatcggttcgttaatgtcgtcgatagggatggaaaccgattcgccgctgtctacgtcagtcacagaccgtttgttgatggcctcggtaatcgactgtttaatctgcgccttataacgacgcaaaaagcgttggcggttaaccatgcttttgtttttgccgttaagtcgcctgtcaataaagtagcccataagtcccccgaatccgatcgacctgaatctcaccttcatctttcgaacggttgttgcgttggcggctttccttcaccccagtcacttagcgggctaaatgactggggggtgttcaattgccgccttgccgccgcccgaaatctcttggggagccccgttatttctcaagctgccgcttgaaatctattgggtttatacctgttatgccgaactgtatcggcaaacgggttatgaagattttcttacccgcagataccattcacacagcaggcgaacttgcttgcgggtataacctttctccatcatccggtcgacaaagtcatcatgttttttctgctcatccgttgaggttttcgcattgaaagagatgactggcagtaactcttcggtattagagaacattttcttctcaatgaccgtgcgtaatttttcgtagctggtccagttaggattacggccattgttattagcccgcgccctcagaacaaaattaacgatctcgttacggaaatctttcgggttactgatacccgctggcttctcgattttctccagttcggcgttcagtgcctcgcgatcgaacagttgaccggtatccggatcgcgatattcctgatcctgaatccagaaatcggcatagataacgtagcggtcgaaaatgttttggccgtattcagagtaggattccagataggcggtctgaatttctttaccgataaattcggcgtatttcggaatcagataacctttcaggtgctccagatacttctcagccacgtcctgctggaattgttccctctcgatttgctgttccagaacatagaacaggtgcaccgggttggccgccacttccgcgtgatcgaagttaaatacgcgcgacagaattttaaaggcgaaacgagtagataggccgttcatcccttcatccacgccggcataatcacgatattcctgataagacttggctttaggatcggtatctttcagactctcaccgtcgtacacgcgcattttcgagtaaatactggagttttccggctctttcagacgcgataagacagagaaacgagccagcgtttccaacgttcctggcgcgcaaggcgcgtgggttaactcactgtgttccaacagtttgtcgtaaatcttgatttcctctgaaacccgcaggcagtaaggaaccttgacgatgtatacgcggtcgaggaaggcttcattgtttttgttgtttctgaaagtgacccattccgattcgttggagtgagccaggatgatgccgttgaatggcagggcagagataccctcagtaccgttatagttaccttcctgcgtggccgtcagcaggggatgcaggactttaatcggcgctttgaacatctcaacgaattccataatcccttggttagcgcggcataatgcaccagaataaccataggcatcggggtcgttttgcgcgtgattttccagcttacggatatccactttcccaaccagagcggagatgtcctgattgttttcatctcccggctcggttttggcaatggcgatctgttgcaaaatcgaaggccaaactttaatcactttaaatttagtgatatcgccaccgaattcgtgcaaacgtttggcggcccacggcgacatgatggtgccgagataacggttaggaatattgtactctttcgccagaatggccgcgtcttcctgcggattaaacaggcacagcggatgatcgttaaccgggctgcgctcgccgttggcgctgagcacatagatgggtacgagctgcatcaaggcttttagtctttcggccagagaggatttacccccgcccaccggacctaataaatagaggatctgtttcttctcttccagcccttgggccgcatgtttcagataggaaacgatttgttcgatggcttcttccatgccgtagaattcttcaaacgcagggtatcgggcaataacccggttggagaatagccgagacatgcgtgaatccagcgcagtgtcgaccatcacggggctaccaatagccatcagcaaacgttcggccgcgttggcataagcactgcgatcctgctgacagacagtaagaaactcctgcagagtgaactcttcgtctttggccgcttcatagcgctggcgatagtgatcaaatatgttcatagcatgcccgtcctgtttgaatggttgggaacataaaaaagtagtagggctttattgggttaaaattttgaaactactaccttattgttatggtcgcgtctgttctaaaggtcaagttggccatggcgatagattgaccaattctgcagtgagggaaggtacttaattagagtattatgctaatattacggggttaactgattgaattatgattcttgctggttttttattctgggaaagtgccggtatactggtgtaatcaaaacgacataaattttacttactttctgttaacagcggtcaaatctatcgcaacctatttatctttgtaatcaatccgcagcgtcagactgcggctttcggtctaaggttggaatgagcgtcgggattgatgtcgtaggtcgataatctgaggacgggaaagaaaggcgcttagagattgatgcgatagcatcatttttatccgcagaagagtaacaataattttcactagttactataattgcttggctaattgcagccgtaaaccgcactgtgattgaaaatgttaccggtttggtaataggcatttcctttataaatcacggagtttttgcctgaatttatgtaaagttccagcagaaagccaacagttgctttacactaaggcaactaattatttgtttacatatggaatagacaatttgtgaaaacctttaaactaaaaactttggctgctgcagccatcgccattagctgtgccagtgctgcacatgccggtacctggtctttaggggcttccgccttagttagcccggatccgtatttgggcaaacaggatcgcgtttatccggttcctgtgatcaattacgaaggtgatgatttttatttccgtactctggctgccggttattacctgtggcgtgatgatagcaaccgtctgactctggacgcttactttctgccgttaaacttcagaccgaatgatagcgacgactggcgcatgaagcagttagacaaacgtcgcggcacgttaatggctggcgtgtcttatgctcataccgaagactggggaattattcgcaccgcgatttcgggggacatgctggataacagtaacggtttgatcggggatgtggcttacctgtataaattccaactgaacaactggttgttgacgccgggtgtgggtgtaacctggaacagcaaaaaccagaacaaatattactacggcgtgagtggtaacgaagctgcgcgtagcactttgagcgcttatgagccgagtgatagctggtcgccttatgctgagttgtctgcacattatcaaattaacgctagctggaatgcattcttccttggccgttatattcaactgtcgagcgaagttaaagacagcccaatggttgataaatcctataccggtatcgtctggaccggtgtgacctatactttttgattaatataatcagatagaatgacaggggccagcaggcccctgattttggttaatttaacgcttaactgacgcttcctcttatcatttccctagcgcgaatggcctattcgcaggcacgccttagatttttttgaagaacaattcgtttaatgctaataatcgtattgatatggattgaatttctatattggcgaaccgtttgaacgaagagttttcaggaaccttattctattttttagacttaatgggttctcatagctatttctgcgttcgattaaacggcgaatctcctatcccatattttaccaataatctggatgtatcctgttgtctatttactcagactaaaacggataagttaatcaggtaggtaaatggttaaggtactggataccagaagaaagttattattttatttatttcacccagttggtttatgtcatcaggacgcttcgttaattcatgatgatcattctcgggagagttacgagtcccgctgattattattttcagtgatatgctacacaggacgcatattaatttaaaggttttggctttcattacattaacgcattagccgaatggatggggattatcgaaaccagtctaaatacaaattataaattctaaagtgtagattcagagagtaaaattgaagtatttaatggaaaggaaatgatggaataaacagtgatgaatttatgttccccgaaaccggctaaagagcgatttatgaatcggctattcgcatattaaaacgacaatctctacgcttttgaaatcaatttcaccgatgcaatagctgctgagcgcaagaaagtcgccatatacatacgaatatatgtggttatctgctacaaggcatagacccatataaaaatggagcaccaggctccattttaacgtactgatattgcgtgcggcggcgttgttaggcgtttttgcggctgcgaattgtcattgcaaggcgagcaggcgcttcatcggccgcgaccatgggttgactgactcgcgcagtttcaacgcaaaacatggttttgtagccatcatttggcatatcctgcatgctgcaagacagctcagggcctgggttccaggcaacaacgtcgctttggtgatgatgatgaatctcaatggttcgtttcagcgccgggtctttaatcaggctgtaaggttccggttgggtataaacccgatctgtctggccgttaaagaccaggtcgccgctttgagcggcgtcgttgattttcaataccttatcgatgtacttctcgcccaggccactaattttaatctggctgatatccccgatttggaaataagtatgcagggcggcggcagcctgataatccccgtgggattccagctccatttcacattcaacgcccagtttgaaacgagcgattaacgtgaaggcatgtggccagtatttacgggtttcgtcgctgtctttcagcgtgaaagtcagcatcacgccgttatcattctcatcgtgcgcggtcagtgtccacggcagaatgcgtgcgaaaccgtgggaaggctgcgccgttggaccgaaccaaggccaacagataggtacaccgccgcgaatcgctacgccgtcggtaaatgcggtattgttgcttagccaaataaccggttgttcaccgctaggctgccatgccagcagatgcgcaccttgcagagcaacggcggcgcgtactttagggtgagaaacgaccacaacgggtaggttgtccagttgacgttggctgatataaggggagatttgttcaacaacgggcagactaaaaactttctcgttcattaatttggccttaattgaaaagtggcagttattcgttgaacctcagattatcgatagtatcacaagcttttctgtttttacctacggcttatatgtagcagattaatcattgatattgcgcaaatttatcggcattgaggcagagaaccgggggaggctaggggcataaaaaaaccgcccgaaggcggtttttactgatttcgacatcaatccattacttggagatgtgggagatcaggtccagaactttgttcgagtagccagtttcgttatcgtaccaagaaaccagtttcacaaagttgtcgttcagcgcgatacctgctttagcatcgaatactgaagtgagtttttcgccgttgaaatcggtagatacaacgtcgtcttcggtgtagcccagaacgcctttcagctcgccttctgaagctgctttgattgcagcacagatttctttgtaagaggcgggtttttccagacgtgcagtcaggtcaacaacagaaacgttaggagtaggaacgcggaacgccataccggtcagtttgccgttcagttctggaatcactttacctacagctttagctgcgccggtagaggatgggatgatgttctgggatgcgccgcggccgccgcgccagtctttgtgagacgggccatcaacggttttttgagttgcggtagttgcatgaacagtggtcatcagcgcttcaacgataccgaatttgtcgttgataactttagccagtggtgccaggcagttagtggtgcaagaagcgttagaaacgatttcttggccagcataagacttgtggttaacgcccataacgaacattggggtgtcgtctttagaagggccagtcagaaccacttttttcgcgccagcagcgatgtgcttacgagccgtttcgtcagtcaggaacagaccagtcgcttcagcaacaacgtcaacgttgacttcgttccacttcaggttagccggatctctctctgcggtaacacggatggttttaccgttaacaaccaggtggccgtctttcacttctacagtaccgtcgaaacgaccatgggtagagtcgtacttcagcatgtatgccatgtaatccgcgtccaacaaatcgttgattgcaacgatttcaatgtcagaacgttcttgagcagcacggaaaacaatgcgaccgatacggccaaaaccgttgatacctactttgatagtcatatattccaccagctatttgttagtgaataaaaggttggttgtaaaattacaaaaaccacaccgagcgtcaagcggaatcgtgtcaattcttgctgcaaatcaaaccaaacgagcgagtttgcacattaatcacacattcctgaaaccattggccacatttctatattggggcgaacccacaagtttaaagggcggggcggtaaattttgcgatttttatcacattaacgcacttcaaaccggaatgggatagagtctaggctaaaatctgctgctttgttgttaattttttgttattattacaccttgttttcgttgactttattccttgtcagagaaccgcacaaatggctaaagaacaaaaccctacaaaacctcttgagcaactgactgatatacagcgtcatgttacgcagaaccacggaaccgaagcgccattttccggcaaactgctgcacaataagcgcaccggggtgtatcagtgcctatgctgccagcaaccgctatttatctccgattccaaatttgattccggctgcggctggcccagtttttacgaacctatcgccgccgactctattcgctatattgatgattattcacataatatgcatcgggtagagatccgctgtggtcactgcgacgctcatctgggccacgtgttccccgacggcccgcagccaaccggcgagcgttactgtgtcaattcggcctcgctgaattttgttgacgatgagagtggcgaacagatagcgggttgaacccttatctcgacgtatttttaatttgcaattttgctgaaaaaacgattcagcaaattattcacttaggaatgcccaatggagcttgatgatttgattgcctccatgacgccggaaatttaccagcgtttgtcgcaggcggtggagttagggaaatggcccgatggtgtagccctgacggcagaacaaaaagagaacagtctgcaaatggttatgttgtggcaagcccggcataacacagacgctcaacatatgagtattggcaccgacggccagatcgtgatgaagagtaagcaggagcttaaacagcaatttgccaagcagccgctgattaagattaaagcgcaataattcaggcgagagccggaaccacactggcgagcatacaaaagcgaaacgggccattccgcctaatgctggtcatttaaggtgaccagcagcctttttatgcgggtactttttacattttgctctgacttcatgcgggtaacttcattcccgtcttaacggcaacatgcaatgtctggcctgttcttaaaatctttttaactctcccggcactgtctgttcccggcgagacccacggcagcgttataagtcgccgcattagcctggttatcgcgcggctaaactcagctatacggcagataatcgcctttcagagggtacgccgttttgaccatctggtagcgaacccaattgtaaacctcatcactcctgccgcatcattccgggtaacctgctgcgaagcgtctaactgtacaactcaaccctatcatgtttagagcttatctaattccgtcaagccgttcggctatctgtgacaatgagactaattgcgcaccggcgctccgcatttcaatcaacgccagctcactgtcttgcggttgcaggttaacaccgcgacagccttcggtaatcacccaggtttcatagcccagggtgagagcatctaacacgctgtatttaacgcaataatcggtggctaaacccatgaccagcagacggttaatactctgcgcttttaaccagtcatccagtgccgttttcgcccgtcgaccgttatcaaagaacgcgctgtagctgtctatctcggggtcctgacctttccgaaatacttgttgaatagctgaactgttcaggtggggatgaaaatcagctcccggttgatgctgcacgcagtgtactggccaccacacttgcgtcagtccattcagatcgccaatcgttcccggttgcgcattggagttaacggcgaaactgcggtggtttgccggatgccaatcctgactggcaataatcgaataatcccgtttttggcacagttcgatagcctgattcgctaccccgatgactttatcgccatcggtgacagccaatgcgccagcggggcaaaaatcattctgtaaatcaattaaaagcagggcggttttcattcaggctccgaagattaaccgacatcggttaattcaccacataggttctgttgcatcaattggcgaatttggtcggcatccagcggctggctgagcagatagtgcaatttggtcaacgccgcttctacggtcatatcaaatccactgatcacgccagcatgagccagagcattaccggtggcatagccgtccatattcacacgaccagaaatacactgagtcaaattcaccactacaatgccacgttcgctggcatgtttcagctcatccaacagttcggctttctgcggggcattacccacgccgtaagaacgcaaaatcagcgccttgaccggctgtagcaagaagttgcgcactaccgcgccggaaatccccggatagatagtcacgaccccaatgggctgcggcgtaatgttatgcacgatcaacggaccgttactggccggagagatgaccgaagttacgcggcgaatgtgtatcccggcttccaataacaccgataggttgggtgaggcaaaggcgtcgaaaccatcggcatgagccttggtggtgcgattgccgcgaaacagtttgttattgaagaacagggtcacttcgttaaccggatagtttgccgccagatacagcgagttcaacaggttggtttgcccatcggaacgcaactccgccaatggaatctgtgaccctgtcactatgaccggtttagccagattctccagcataaaagacaaagcggaagcggtaaacgccatggtatccgtaccatgcaaaatcacgaagccatcataaagatcgtaattctgcttaatgtcatcggcgatgtgctgccagtcttccggcgtcatatccgaagaatcaatcaaaggcgcgtattcgtgaatggtaaaatcgggcatttcaggacgatggaattcaggcatcagcgccagttgacgttgtaaatggccggataccgggatgtaaccctgttcagagcgctgcataccgatagtaccgccggtataggcaacgtaaatggatttcttttgcatgtaagcataccgctgagtgagatgactggattatagggtggctggcgcagaaaaaaagcccggcaagtaccgggctggagatttatctgttatttgcgttgtttatcagcgtacatcaccgcaattcaggcaaagcgcatagcgattctgtggatcgttcagattagtaaagaaacccggttgatcttttaccgccatggcgagcgtggaaactggcgctggcagccaagcttgcagcactgaaggcagcacggcgtgaaccgacgcccccatttgcccaaacagcatatcgatgaagcccggctgatcgacataccagttcagctggtaggttttcagcttagccagctcggcggcttttttcaccgcgtcatcgaagtcgcccagttgatccaccaaaccgttgtttttggcatctaaacctaaccagacgtgtccttgagcaatggcatcaacctgctcaggtgttttatggcgcgaggtagcaaccagatcgataaagttcttataaccattctcgatgctgatttgcatcatctgagcaaattcaggcggcaaattcttggtgacagccacgtcagccagcggcgaagtagctacgccgtcggtatggacacccaaggcacccagcgaatcctgataggtgttgaccacgccgaagatgccgatggaaccggtcagggtgcttgggctggcgataatgtagttcgccggggtggatacccagtaaccgccggatgcagccatcccgcccatagaaacgacaagcggtttgtttgcggcacgtagcgcggccagttcggagcgaatcagctcagaggcgctgacgctgccacccggactatttacccgcaataccaccgctttgattttcggattcaaacgcgcttcacggatttgtgccgcggtattatcaccgcccacgctgccgggcgtttgtggaccatccataatcgccccgttaataaagataacggcgatttcttcaccttgctgcacttttggagcaggttggtaatcgtaaatactgacggagttgtaatcgtttttttgcttgtcccagccgaaagttttgatcaattcagcttctaccgccggacgggaggccaactgatcaaccagtttatgttccagcgcgtactgcgccggatcgccaccaacctgctgcaagccgctgataataccggccgctccggggaacagttgttcaggagtgagctggcggttagcggcaactgccgtcagatagttattccacatgccgccgatccagcgggtatccgcttcacgcgcagccggagacatatcatcgcgaatcataggttccacggcggatttataagtcccgacgcggaaaatattggtcgtgactttcagtttttccagcagagatttgtagtacaggttattgctggcaaagccttttagatccaccgagccttgaggagacaggtagattttattggcgaaactggccagataatattgttgctggttatagctatcacccacggcatagataggcttgccactgtcacggaattcgcgtagcgctttgccaatgtattgcagagaaggctggtcggcaccggcaaaatcagacagggacaaaacgagcccattgatattgttatcggttttagcccgacgaagggtttccaccacgtcgaacagcgaattttcctgcagacggttgctcgatgcccctaacatttcgcgggtgaactgcatcactttattgttcactgccggcgtatctaccaccacaccggtcagattgaccagcagagcaccttttaccggttcaaccggcttgctttggaccatcagataaataccgacgcccacaacgatgaggaaaatcaggaacaggttaagaacgaattctctgacaaaattaagtagacgccaggtccacttgaaaaaaccgctaataattcgccacaaagtgcgcatgtgatctccaacaaatccgagcaagtgggggtatcctaatgacctacaaataaaaagtcagtattaaatcatcagacagctaaacgtattggtcaagctggtaacaaatcctctacttatgttaccgtgctgaaaatgaagatcgttatctggagaagagtatggatgcgttagatttgctgcttaaccgccgttcggcctcgcgtttgaccgcccctgcgccaactggcgaagcgttggaaaatatcattcacgccggtatgcgcgctccggatcatggtgcactgcaaccctggcgttttgtgctaattgaaggagaagggttgggacgtttcagcgaattgctgcaaaaagcagtgcgccatgatggctccgacgatgcggtactggaaaaggcgaaaatggctcctttccgcgcgccactgattattaccgtgattgcccatgtgacggaaaacccgaaagtaccaaactgggagcaggttgtttccgccggttgtgcggtgcaggcaatgcaaatggctgctctggcgcaaggttttaacggtatctggcgaactggctcatggacacatcattcggtggttcgggccggttttgcctgccgtgaacaggatgaaattgtcggtttcctctatcttggcacaccgcagttaaaaggttccagtaaggtgacgccgccggatgtcagcaccttcgttagccacttttaagcctttcccaatgcagcttaggccagaaattggcagcttaagctgcgtttccgtctgctttgtgaccaagctaactgcctgaacagccagcgctacttatcaattccctcggtaagcgctaccataggcgatatgttctttgcctatcataatcagtgttaattaatccgatgatggttaaccgagggaagtgatatatgacatcgccagcgatacgtcttacgcaatatagccacggagccggatgcggctgcaaaatctcgccgaaagtgctggaaaccattttgcactccgatcagcagaaattcttcgatccgcggctattggtgggtaatgaaacccgggacgatgcggcggtgtacgatattggcagcggtgtcggtattatcagcaccacggatttctttatgccgatcgtggatgatcccttcgattttggccgtattgctgccactaatgcgatcagcgatatctatgccatgggggggaaacctattatggcgattgcgattcttggctggccgatcgataaattggcgccggaagtggcgcgtcgggtgattgaaggtgggcgacacgtttgcgctcaggcgggtatttcgctggccggtgggcattctatcgatgcgccagagccgatttttggtctggcagtgaccggcgtggtcagtaccgaacaggtgaagaaaaacagcgccgcacaggcaggctgcaagctgtttttgaccaaacccttaggcattggcgttctgacaacggcggaaaagaaaagtaaattacggccggagcatcaaggcgttgcaactgaaactatgtgccaattgaataaatcaggcgctgattttgctcacattgccggcgttaccgcgatgaccgacgtgaccggtttcggcctattggggcatttaagcgaaatctgtcagggttccggtgtgcaggcaacgctacatttttcggcgattcccaaattgcctgcggtggttgaatatattgaagaaggctgtgtgccgggggggacgcagcgtaactttgacagctacggtcatctgatcgggcagatgtctgatttacaaagaaaactgttgtgcgatcctcaaacctccggtggcctgctactggcagtattaccggcggctgaaaatgaggttcatgccgtagctgagcgctatggcatgatgcttagcccgataggggaactgactgcaccgcgcaccgatcgcgccttaattgagatttgcgaatgattttcccatcgccttcaataccgatactaccgacgtttctttagggccgctaatgcaactgtttattgccgaaaaacccagtctggcccgcgctattgccgatatcttgccgaaaccccataagcggggggacggctttattgcctgtggtaatcaacacgttgtcacctggtgcgtcgggcatttgctcgaacaggcgcagccggatgcctacgatagtcgctatgcgcgatggtcattggccgatctaccgattattcctgaaaagtggcaattgaagccgcggccttcggtcagcaaacagcttaacgttatcaaacagttgttacagcaggctgatgaagtcgtccacgcgggcgacccggatcgcgaagggcagcttttggtcgatgaggtgttggattatctgggattagcggcggaaaaacgacagaatgtgcggcgctgcctgataaacgatctcaacccgcaggcggtagagcgggcagtttctcgtctacgcgataacaaagagtttattccgctgtgcgtttccgctctggcgcgctcacgggctgattggctatacggcatcaatatgactcgcgcttataccattctgggtcgtaatgcgggttacgacggcgtgctgtccgttggccgggtgcaaacgccggttctggggctggtcgtccggcgggacgaagaaattgaagactttgtacccaaggatttctttgaggttaaggctcatattgttacgccggccgatgaacgctttgttgccttgtggcagccaagcgattcctgtgaatcctatcaggatgaggaaggtcgcttactgcaccgtcccttagctgagcacgtcgtcaaccggatcactggccagccggcgcgggtgacatcctataatgataaacgggaatcagaaaccgcacctttaccgttttccctgtctacgctgcaaatcgaggccgccaagcgttttggccttagcgctcaacaggtgctggatgtgtgccagcgtttatacgaaacccacaaacttattacttatcctcgctcggatagccgttatctgccggaagagcattttgccggtcgtcattcggtgttgaatgcaatcagcgtgcatctaccggatttacagccgccagcggtgatggacagcgatcgccgcaatcgttgctgggacgataagaaagtggatgcgcaccatgcgattattcctactgcccgctccagcaaggtttcattgacgcaggatgaagccaaggtctataccttggtcgctactcagtatctgatgcaattctgtcccgacgcgatgttccgcaaatgcgtgattgaactggatattgccggaggaaaatttatcgccaaagctcgttttctggccgaggcgggctggcgtacgctattgggcagcaaagagcgagacgaggaaaacgaaggttcaccgctgccggtggttgctcaaggggacgaattgctgtgtgaaaagggcgaggtggtagagcgacaaacgcaaccgccgcggccttttaccgatgcaagtttattgtctgccatgacgggcatagcgcgctttgtgcaggataaagaactgaaaaaagtcctgcgcgcgaccgatggtttagggacagaagcgactcgcgcgggcatcattgaactgttatttaaacgcactttcctatttaaaaaagggcgttacattcatgccagccctgcgggaagggcgttgatccatgcgttgccggatattgccgctcgacccgatatgacggcgcactgggagtcgactttgacgcaaatcagtgagaaaaactgtcgttatcaggattttatgcaaccattagtggtaacgctgcaaaatttaatttatcaggcaaagcagaaccgaacgcctcaggcgtttcgtggtttaccggctgcgccggccgttccggctaaaaaaagtaaaaaaaccagcgtgaaggcaaaggagagtaaatcatgaaaaaaaccataatgatagggtgcctcgcgttgagcgttttattctgcagcacgacttgggcaaaccgcccaaacctgggaaataacgtggatgtggtggtgcctttgcctccggacatgtggaataacgccggtacgcgtggaaccaataataataactgtccccgctgctgcgtttatcaaaatcagaattactcggaaggggcagttttgcgggtggaaggcgagatattgcagtgtgtgcgggatccgaacgtcaccggaacccatccactgatttggaaacgacttcctcgttaacctatttggttgtccgttggctgataaaggcttccagtaaaggaatatccgccggagccaacggataatttagtgcttgctccggagtgacccagattaaagccgaatggcaatgcatctggggttctccgtaaaattcctctacgcgccaggcatgtaaacaaattctgcgatcgggtaaatctcgctggtggctggcaacgtaaccggaaattttggcgtcaatgtccaattcttctgctaattcgcgtcgtaacgcctgcggctggctttcacctggctcaacctttcctccgggaaactcccacaaaccggcctgatcgctgctttcatctcgctgagccagcaggattttgtcctgatgctgaatgatagcggcaaccacgtcgataagtttcatgaatataatctctcagaggagccattcggcgtataagaattgcgacattccccgtgttgccacggggaaaatagcgatgaaaatagttatagagaaaactcagaccagatcggggcgtgatcggacggtttttccatactgcggatctcgtaatcaataccggtagaaatgcagcggtctgcaagtgattgagtcgctagcacaacatcaatgcgcagcccgcggttttcatcaaagccgcgagagcgataatcgaaccaggagtaacgatcatgacaatcagggttggcggcgcggaaagtatcgaccagcccccagttttgcaaacgggctaaccattcccgctcttccggtaagaacgaacattttccggtgcgcaaccagcgcttacggttgtcttcaccgatgccgatatctaaatccgttgggctaatattgatatcgcccatgattaaaacctgcgcctccgggcttaattctttttccaaatagctttgtagatcctgataaaaacgttcttttgccgggaatttagtcggatgatcgcggctttcgccctgtggaaaataaccgttaatgacggttaaaacaccctgtggcgtttccagatcggccataataatccggcgctgggcatcttcttcatcggttgggaaaccacggcgcactgccagcggttgctgcttggtgagcagagcgacgccataatggcctttttggccatgataaaacacgtgatagccatgctggctaacttcttcaagagggaacatatcatcgtgaactttggtttcttgtagcccaataacgtccggctgatgttgttcgatgatcgccgctaattgatgagggcgggcacgtagaccattgatattaaaagagacaaatttcatagccagcgtcgtttcctgataaaaatgtgcgtgaatagtagcagatatccgataaaaatgtaatgaagtggggaggtggctgagtcgatagggggcgctttgctatagatttacattcagcgatttaaacttgttataggctgtcttattcacaatatagaaaatgtaatgactatgagtgggagtagatgcagttaaggataaactaacatgtattctggactatatatttaagaagtcagttaactatcccatcgttaaatattaaaatcagacttttatatggtgtaatattaaaaatagagagtgaactataatcctcacatctaacatttgccgcgtgtcagttattattttgttgataaattagcttaaaaaaagaatggtaaggtgttggtatttgaataagcctcattatttagtcatcacagataaataaatttatcatttgttatagtgacgtagtaacgttatcagcatgattggcaaaaaataggatttattataaatctggaatttattttgtttctaattttcactatctttattataggtaagccccgcgtttgacaatattttaactaaactatggtagtgaaatgcctcaagaatttttatgggttaacgccgctataatataaaaaataattctgttaatttattttaataggcttcagtgaaatggctttttttaggtcggctaattaaaatactctaacttttttagtagtgctgatcgacagttaaataatcagtcaaatgctaatataccaaattagaaaatcaataaacagccattctggcggtgtgaaaatttgcatatttaatattggttattatctacagctctggctgactatccctatttttatgatgaatattaacgtgtaaatgaataaaattaacacacgattatttttcattcatgaacgaataaaaattattagttaataagcatggaattaagtatcgagttttgttaaaaattatagaacataaactatatatatatttaaaaccaattcatgcatcgctgatgaatattatgatcttaaccgtacttcaaatacataaatgtcattttatgagccacttttacaatacgtgtttactgttcttattttagatttaacctgttgtttttagtgattttttttcaataaaatgaagttgagaaagtttagtgattgtgaaaaaacaatttgtccgggtaaccggtagcatttttaataatcaatggttgaataaaggatggtgaactatgtttttatctagaaaactagaggcatttatggcggttgtggaatacggttctttaagtaaagcggcgcgagttatgaatcgcactacgccacccgtagccaaatcgattaaagactttgaaagtattataggaaagaaactgttcaaaagagaaaaatttggcatgagcctcactcatgatggagaagtgctatataatgatctgaaggatcttcatcagcaagataaagaaattaccagcaaacatcttacggggcatgtttctaatgcggtgaatatttattacgattggggtaaggtggatagcttaacaaaaatatgggaagtggcagagaagaacaatatacatgcaagcattattagattttgctatgaaatgattgatgatatttgtgactttgacggaaatagcttgattatctcttcagagaaaattctttgcgacagattttctctcattaaagaagcctgtgataccggtttgggggtttatgcccgtaaggaaattattggtgaaaattcagatattatcaatttattacgtagcaatacttggctatgcaatccaatactgtataagagcgaatttataaaatcgttagaagaagaggtgaagaagtctgtgagcaaagttagcatcagacaggtagataatttaaattgttgcctgagttttatcaattctggtaattatgtttgtattactgactcgattatcgatagttttgccgtttgtaataaactaggttttgttaaccttaaagatcactttggcgatcataagttctacttttataaatccagatcgcattccagcgtgctcaatgggttaatagactttgtaaaagcaataaactgataagtaaaaattagcgcactgaggtatacagtctggtagtttgtcatgtttgttggcattgattcttgatctatataagactcagatagaggaatatttatatttcttttatcgtggttggcatgctgacaaacattacttttgagtcaatagggatgtaacgcacccagtgtcactttcgcgctgagaaccaacatgtattccatttgggtaaagcatcgccattgaatgagggacgggggtctatcgcattgggttgttcatattgcctctcgtcaaaggtttggcgatagaacgagtttagagcctagcaaaggatagagaggatataccgggtgtcggtggcggaaaatagggtgtggtttggcgaaatttaacctggttaagcacctttttgattttgaaccgaaataaaaaatcattttgaaccgaaataaaaaatctatagtgcgatcttcgtttaaattgacgagtatatgactgagcgcatcctgttcaactctatccaagggctgttaactaaggggaatgctgctcatcttagcttctgcctgaagcgttaaggcctgctagaaggcgaaaggagtttattggtaggataataccggtagttgggggagcatcatttcgttcttcacccttcgggttaccgaagtgcaatgttgtctcacgctgctcgactcaaaccctgtcgaaagttattaccttcgcccaaaatatctaagggtggtttggtgatggggttaataccttggaaatataatagagatggtggtgggggaaggattcgaaccttcgaagtcgatgacggcagatttacagtctgctccctttggccgctcgggaaccccaccactgaattcgtggtttttatttctggctaaatacctggccggtattttttaatgattttgctattcatcttaattactgcgcttggctatttaatattccgaataacctaacaagccagtttaaaatggtggtgggggaaggattcgaaccttcgaagtcgatgacggcagatttacagtctgctccctttggccgctcgggaaccccaccactggcctaactgcttagaaacgttgtctcggtaagcggggcgcatcatatcaaatgaagcgccactgtaaagacttgatttgaaaaaaaagatttgtttgccgtttttttgctcttgaaggtgtttcttcaaacaaaaactaacgatttattgtgcagttacagaataactgtgcgattaccgtaaacaaaaacgcgctgcgctaaaacacgataaagtgcgcggctcagtacgtttttctccacatctcggccagcacgcatcatatcttcagcggtataagaatgatcgacgtggataacgtcctgcatgataattgggccttcatccagactgtcatttacatagtgagccgttgccccaataattttcacgccgcgttcataagcctgatgataagggcgtgcaccaataaaagctggcaggaatgaatgatggatattgataatttggtatggatagcgctgtacaaaggcaggagttaatacccgcatatatttggccagaacaacataatcaggttggtattggtcgatctgcgtaatcagctgttgatcgtgttgatcccgagttaatccttcatggctaaccagatggaaggggatatcaaaccgctcgaccaggtgtcgcaatgaatcatggttaccaatgacggcggcgatttctacatccagtccaccataagcgcttttcattaacaggtcgccaaggcaatgagcttctttggtgaccatgataacaatgcgtctgcgccctgcagtatgcagctcgcggctggtaccttcgggcagtgcatcatccaaatcggcgagcaacgttgtgtcgttaaagatcccttccagttcggtgcgcataaagaagcgcccggtcagatgatctacaaactcattattttgaacaatattaagctgatgcttgtaacaaatattggtgatcttggcgattaaccctttggcatcaggacaaatggtacgtaatacttttctttgtatattctggtgtggcataagttggtcaatcctgtctgagatatctttgatgttgtgttttaattcgatgcagccagattaggcacgtttaggcgtaaatcatccgcagcatttcttatattttttgcctgaaccgcaaggacaactgtcgttcctgccgacctgagggcgtattccatcaatatagtaccagcgttcatttaaacgaaggaagcgcgaacgttcatgcatcatcgaaatggcaccgctattgccttctttaaatcgggcaacaaactcgacaaatccttcatctggatgggaaccggccgcttcttctctaacggttaaacccaaccactgcgtgcctgcaaaaccctctgcgatattgtcacgccatttttctgcatggcaatcgggatgccaggtacctaccaaataattgacgtcttctttgacataagcgctgtagcgcgaacgcatcagaatgccaggcgtagctgctactttagcgccgagaatatagggttcgcagcaaagttcgtaatttatacggcttccgcaggggcaagactctgtcaaaatatctcctgataacataattaaattcgcgtaatgcaatctcttcgtggcaaggttgtgtaatgacgattgcctgacgcaattttccaggatgtgcacaggaatgattaaattgtgcagatcggtccaatttgaaaggtttcagccgtatatcttacctaatcaccccccaaggttcaaaggcatggacttaaaatgggaatcgcgtgtcctgtgttttttattgtgatgccaatggctaaaattgaccggtgtttcattttaatgtaaattgcgttttgtgatttagatcacattgtaatggcgaaattgaaaggtcaaaatcatgaagttaatcaatagaatcatcgcgatgttcgaaaacatgcatatctctttcggcacattcaacgcctaatcattttctggcgtttttacccaggcctgatgaggtctgggtatcatttaactcaactcgctgatagtgagtcgtattctacgattccgatagtgttcttcatcttcactttgcctcatccctcaactcccccaggtaagattccgtcctcagattgtgctccatataaacgttaccgtctcattaaacgggtgggttatcgagatgcctcgtagcaattattctctgttgcaatacgattaactttctctgtgagactccgtgcaaaatgcaagattagtcacgattacttacagccaaagattggattgttcacttatgatgctgtaattcagcgattagaacgcgatggttcgatgataatcagggttataaattgctcgataattcatttggttaatttgatgaatcagatggcagagtgatgactaacaaggatgttagctgtatctcactaatgagaattaatgaaattacaactaatgaaagcgtgcatgatgctaagtcctgtgggcagtatagccaaatagacgctgttaatagttttgagcatagctgacgttggttgcgaaacgggaaccgtattcgagtgagatataccgaaacacatgcgagtggataatgcgacaaataaaggtaggtttagctcttggtgcaggtgcagcaaaaggatgggcgcacattggtgtgatcaatgcgctgaaaaagctggatgtggaaattgatatcatcgccggttgttcggttggtgcactcgttggcgcggcgcaggcgacccagcacatgccggaactggagcgttgggtcagatccttcagctattgggatgtgattaaactgatggatttttcatggcgaaggggcggattactgcgaggtgaacgtgtatttaatacggtgggcgaacttctttcaatcgatgacatgagccagtgcgccattccttttggggcggtagcaaccaacctgagtactggtagagagttatggcttactgaaggcaatatccatcaggccattcgtgcatcctgtagcatgccgggattgttctcccccgtttggcttgacggctactggctggtggatggtgcggtggtgaatccggttcctgtttcattgaccagggcaatgggggctgacgtggtcattgccgttgatttacagcacgacgcacatcttatgcagcaagatctgctttctatcagtatgccaacggaggaaactccttccgatatgccacaaaactggcgcagtcgcctacgtgatcgcattgcccatctggcaccaaaacgttcgaatacgcctccgagcgcgatggaaattatgtctacctctatccaggtgttagaaaaccgcctgaaacgtaaccgtatggccggcgatccacctgatgtgctgattcaaccttattgcccacagatatctactttagattttcatcgggcgaatgaagccattgctgccggtgaatcggcggttgagcgcaaacttgagcaattagtgcttttagctaaaagaagaggaaaaacacagaatggaaataaaaattgacgtcatggccacttctggcaagcacaagtcacctttttgagccactattagcacaacgatagctaagagataacattgcatggacaaaccgtttacagataagaacattttgattgttgaagatgaaatggtctttcgcacggtactgaataattatctgagcaacctaggggcttcgatattacaggcatcgaacggtcttgaagcattgaatttgttggaaaacagtatgcctgacctgattctctgcgatttggctatgccagaaatgggagggattgaactggttgagcaactgctggttcgggggattaaaactccggttctggttatctcagccacagacaaaatgacggatatcgcgcaggttctacgtttgggtgtaaaagatgttttactcaaacctatagatgatttacatcgcctgcgggaagcggtattgacttgcctgtatccgacattgtttagctctccggcgattgaggaaactgaacttattcaagactgggatgcgctgaagaaaaatccgtttgaagccgctcagttactgcatcagttacaaccgcccgcgcaacaagttattgctcgttgccgcgtgaattaccgccagctaaccggcgttgatcaaccgggattggttttggatatcgccgcactttctgatagcgatttggctttctattgtcttgatgtcactcgagccggtgataatggtgttctcgcggcattattactacgggtgttattcaacggtatcttgcaagaacacttagccggtcgccatcaccgtctgccgcaaatgccggcgttgcttaaacaggttaaccaactcttaagacgagcccatcttgaagggcaattccccctgttggtcgggtattacaattcggaatacaaaaacttgatcctggtttccgccgggctgcatgctaatgtcagcgcgggtaaaaaccatatacagctgagtaatggcgtgcctttgggaacgctgagaaccgctcatttaaatcaaatcagtcagcgctgcgaggcttggcagtgtcaggtatggggagggggcagccaattaagacttatgctttctgctgaataatattcattatgcttatttaccattcgtcatccattatccccactgtcttatttccctcccttttttaagtctcgtatgtagcctattttttgaaccaatgaaaagaaactctgacctgtaaatataagtcagcttatatccttcgtttttccgttgattgctacacttcaattgccgggtcttaaggttacgttaatgcttctctcttaaactacgcttaatggctgacagcatgcggaaatagtcatgcccttcgtggcggcttaggctattgaaaatcgcaaactaatcatgcaacaccggattaatcgcccatgttgaatctgaaaatgttaacgatggttgataaagcattaatacagactgtgcaattgtgtgctgctgccagcagtagccactaacgtaccagggtttttattcatctaccttttattctagtggtccgagagttcggtgaatcgccgctgcaaacggtttgtatcgtttcgacaatgtgtcattagcgcaatacatgtagcggtatgctctggcttatttattaaacattcgatcgctaaagatgattgaaagtttcgtggctaacaattggttttcgatttaaacggttagggtaaatataatgaaagtaaccatttttggtattggctacgtcggattggttcaagccgcagtatttgctgaggttgggcatgatgtactttgtattgatgtcgatgcacgtaaggtagaaggcttgcaaaaagggcatctgccaatttttgagcctgggctgtctactttggtaaaagaaaacgttgaggctggtcgtctgcatttctctacggatgcgaaagctggtgtacatcacagtgccatccaatttattgctgttggtactccgccagatgagaatggtgccgcagatttgcaatatgtgattcaggtttcagaaactatcgctaaatatatgatggaacctaaagttatcattgataaatccacggttccggtgggtactgccgataaagttcggagtgccatggctgcagttctacgtcagagagatatagagatcgactttgatgtgatatccaatcctgaatttctgaaagaaggggcggcggtatccgactgtaagcgccctgagcgtatcgtaataggtactgacaataatgacgtgattccacttataagtgagctgtatgagccatttaatcgtaatcacgaccgtatgctggtaatggatgtgcgcagtgctgaactgacgaagtatgcggctaactgtatgctggcgacaaaaatcagttttatgaatgaaattgcaaatctggccgaactattaggcgcagatgtagaaaaagtccggcagggtatagggtcagattcgcgtattggctatcactttatatattcaggctgcggctacggtggatcctgtttcccaaaagacgttcaagcattaattagtacagctgagaatattggttatcaaccaaaactgttacaagccgtagagcaagtcaacattcagcaaaaatccaaactgactcagtttattaaaaaacactatggcgataacctggctggaaaaacttttgcgctatggggactggcatttaaacctaataccgatgatatgcgtgaagcgccaagtcgtgttttgctggagtcgctgtgggaggctggtgctattattcaggcttatgatcctgaagctatggacgaaactcagcggatttatggttcgcgtgacgatttgagattaatgggaactaaagaagctgcgcttcagggggcagatgcgttggttatttgtaccgagtggcaaaactttcgagctccagattttgacgttatcaaatccagattgaaagaagcggttatttttgatgggcgtaatttgtacgacccggagcgcttaaatagccggggctttatttattatgccatcggccgcggagcatcggttaatcacgctaactcgcgctaagtaagaacattctgagcagcggtatgttttacaacggcatactgctgcattttctgatttttctatccacgttaaaaccgtaaattttcttctgaataaatctgacgttggtaaaactatgacgacactttacctgaaatttaaaactaactattaatattgttatagattagcagagtattcttatggatttgctatgaaaatgataacggagagtaatttatagagaagtgtaatgattggtaagaaattgggaattttttctgggttaaggatcgtttttaaaacccaataaaaaataccctcaacataagaagagggtatttctcagataatagtaaatgtttaaatactattacagtaggaaatcgtccagcgatttaccttgttcatcgagagctttcttaatcacagctggagtacggccttggccggtccaagttttcagttcgccattttcatcagtatattggtatttagctgggcgagctgcacgtttagctttgcctgctgctttagctgtacttaaagtggccatcagctcgttcgggtcaataccgtctgcaataagcatttcacgatattgcgacagtttacgctcacgttcttcaatctcagctttagactgacgttcttcttcaacacgctcttcaacaactaccttcagcttctcaagcatttctatcaatgtatcaacgttacattcgcgcgcttgagcacgtagagtacggatgttgtttagaatttttaacgcttcgctcattgtcctggtctcaattataatgttggggggcgtctggataataatagagtgctattttaatttctgcaatagccaatttgattagcttactggaatttactctttttaaaagctgaaagttgtctatcgttagtaataagtgatgagttcgggcaattagtttgcacagttctaagacaaattctcgatatgtgagtaaaagttgcaattttagaacatgattttctcactaagctataagtatgctttatatcaataaagcaaaaaatagagcgttgttgattgtgcttgctcgtttacaaccatcgaaaaaaatgtggatatagatgacaaaatcgactttgccaaggatacctttaaccggataaagtcgcaacgacactaataaatatgtctgttaggtatttaatgttaatttctatcgctgccatgatgcatgggattaatgagtaaaatgggctattgttgaattcgatgttttttttggtttttactccttttagtacagccccatgtttggggaaaatctttaagcgcgatgaaactgtgaactcagtcaaaaaatagcatcgaatggattcttaaatcagtccaggtaaaagaagccggaatgctttcatcgcattactcaatttattaaacttattaacctcctgcatcccctgtcagcttgcgcataaagtttgtgttacactatggcatatcgttaatttgcgcttttaatataccagtggagttacgggcccatggctcagctttatttttattattctgcaatgaatgcagggaagtccaccgcattacttcaatcctcctataactatcaagagcgtggtatgcgcacactggttttcacggcagagattgataaccgtttcggcgttggcaaagtcagttcacgtatcggcctaacctctcaggctcagctttataataatgaaacccaattggcggccattatagaagcagagcaccatgataagccggtgcattgcgtgctgctggatgagtgccagttcctgaccaaagagcaggttaggcagctttgccacgttgtcgatgaatatcatattccagtcctttgctatggcctgcgcaccgatttcctcggggagttatttaccggcagtaaatatttgctggcctgggctgataaattggtggaattaaaaaccatttgtcactgtggccgtaaagccaatatggtgctgcgattagatgcgcagggcagagcggtgcatgatggtgagcaagtagtgattggtggtaacgaaagctatgtttccgtttgtcgccggcattataaagaagcaatcagtgcggcctgcacgccgttagctgggcagggcgatatttaatcctcgagaatccccctcagaagccccatggacgttttttttgtcgccgtagggtgacttacctttttgtctttcctcgtattagcattctgttgacgtcgtttgaacctaaactcaatggcacagacagatacgttcgttaatctatgtaccttagccgatgaataataggaatagcggcagataattatgatcgggtcgatattcactatgagtctcgatgacggggaaataatgggtagggtttgacaatgttgctgcacaagaaaaccccccaatcagatttaccgattgaggggtagacagtttgctgattacccaccgttagatgagcagtgcagtcaaatgattacttcttggtctttttttctgctttaaccacttcttttgcagctgcttcttcacgttcgaattcttcgacgtattcgcggccataataagtgtccatcagaatctgtttcagctcagagatcagcgggtaacgtgggttagcaccggtacactggtcatcgaaagcatcttcagacagtttgtcgaccttcgccaagaagtcagcttcctgaacgcccgcttcgcgaatagaagtcgggatacccagttcggctttgatttcatccaaccaagccaacagtttctcgattttctgtgcggtacggtcgccagcggcagccagacccaagtggtcagcgatttcagcgtaacgacgacgtgcctgtgggcggtcgtattggctgaaggccgtttgcttagtcgggttgtcgttcgcgttataacggataacgttagagatcaacatggcgttagccagaccgtgcgggatgtggaactcagaacccagtttgtgagccattgagtgacagacacccaggaaggcgttcgcaaacgcgataccggcgatagtcgctgcgttgtgtacacgctcacgtgcaaccgggtttttcgccccttctttgtagctggctggcaggaattctttcaacagtttcaacgcttgcagcgcctgaccgtcggagtattcgttagccagtacagagacataggcttccaaggcatgagttaccgcatccaatccgccgaaggcgcacagggatttaggcatattcataaccaggttggcatcaacgatagccatatctggagtcaatgcgtagtcagccaatggatatttctggccggtagcatcgtcggtaacgaccgcaaacggtgttacttctgaaccggtaccggaagtggtggtgacggcgatcattttcgctttcacgcccattttcgggaacttgtagatacgtttacggatatccataaagcgcagcgccagttcttcgaagtgagtttccggatgttcgtacattacccacatgattttggccgcatccatcggtgaaccgccacccagcgcgataatcacgtctggtttgaaggagttcatctgctcagcacctttacgcacgatgctcaacgttgggtcagcttcaacttcgaagaagacttcggtttcgataccgtgagatttcagcacgctggtgatttggtcagcgtagccgttgttgaacaggtagcggtcagtcacgatgaaggcacgttttgcaccgtcagttgccacttcttccagcgcgattggcagtgagccacggcggaagtaaatagatttcggtagtttatgccacaacatgttttctgctcgcttagccacagttttcttgttgatcaagtgtttcggaccgacgttttcagagatggagttaccaccccatgaaccacaacccagcgtcagagacggtgccagtttgaagttgtacaggtcaccgataccaccttgtgaggcaggggtgttaattagaatacgggcagtcttcattttatcgccgaagtatttcacgcgagcagtctggttatcctggtcggtgtacaggcaagaggtgtgaccaatcccgcccatttcaaccagtttttccgctttatcgactgcgtcttcgaagctcttcgcacgatacatcgccagagtcggggacagtttttcatgagcaaacggctcggattcgtccacaactttcacttcaccaatcagaatcttggtattgcccggaaccttaataccggccatttcagcaattttagttgctggctgacctacgatagccgcgttcaggccaccgtttttcaggatgatgtcctgaacggctttcagttctttaccttgcagcaggtagccgccgtgggaggcgaaacgttcacgtaccgcgtcgtatacggaatcaacgacgataatagattgttcagatgcgcaaatgacgccgttatcaaaggttttagacatcagaatagaggctacaacgcgtttgatatctgcggtttcatcaaccacaacaggcgtgttacctgcgcctacgccgatagcaggtttaccagagctgtaagccgctttaaccatgcctgggccaccggttgccagaatcaggttgatatctgggtggtgcattagttggttagataattcaacggtaggggcatcaatccaaccaataatgtcggctggcgcacctgcagcgatagcggcttgcagcacgatatcagcagctttattggttgcgtctttagcacgaggatgcggagagaaaatgataccgttacgggttttcaggctgattaatgccttgaaaatagccgttgaagttgggttggttgtcggcacgataccgcagattaaaccgataggttccgcaatagtgatggtgccgaaagttttgtcctcacccaagatgccgcaggttttttcatctttgtaagcgttatagatatactcagatgcgaagtggtttttaataaccttatcttcgacaatacccatgccagattccgctacggccaatttagccaaagggatacgggcatcagcagcggctagggcggcagcgcggaagattttatcaacttgctcttgagtaaagttggcatactcgcgctgggctttcttgacgcgtgctactagctcgttaagttcagcgacattcgttacagccataatgctctcctgataatgttaaactcttttagtaaataagcagttgaagcaactagtatagtcaggctatctcgtgctgcattgtcgaataggaagacttttcgcattctactcaaccattactaccgctgatttactgaaagagctttctttatttttgtcggggtgcggatttgaagctaaccacaactgacctttccaagctctctacctcttttcctatgacagagcttaactattcttaggtatggatttcgtgatttaaatcacaaaaacgtcaagctgacacctttcagcagcgttgaattgagaattaaaagcattaaaaccataaaggcgatattttatgacgttaaaacagcagaaaagacacactttgttaacagttgctcgcctattttttgagtaaacttattgcgtattaaaatgctgatctaatccatagattccccaatgtaattccattacattagcgcgcatatagatgaaggctgtgcgttatgccagtccggcagccaaaataactgcctgaatggctccaagcggcgggtttcttctgtagtagcttgtagtcgcgccgtcacctgagcaaaaactggtcagggaggcgctaatcgacggacattaaccgctaatggtggttattgcgccgaggtactttatattagcgatagtgcggagtgggtgtgagtcaatcactgttggacctgtcaggctacatcaagttttttgttggcttgtttgcgctggttaacccggtaggaatattgccggtatttattagtatgacgagttaccaggcagaagcggggcgcaataagacaaacctgacggcgaatctttccgtcgccatcattttatggatagcgctattccttggggatgccatcctgaaagtatttggtatttctatcgattctttccgcatcgccggcggtattctggtagttagcattgcaatgtcgatgattagcggcaagctgggcgaggataagcaaaacaagcaggaaaaaaccgaaacggcagtgcgggatagtattggcgtagtacccttggctttaccattaatggcaggcccaggggcgatcagttcgactattgtctggagctcccgctatcacagttggctaaatttgctcggtttaactcttgctatcgccttatttgccttctgttgctggctgctatttcgcgcggcgccgctattggtacgcttgctagggcagaccggtattaacgttatcacccgaatcatgggtttgctgctgatggcattaggtatcgagtttattgttaccggtttaaaggccagcttccccggcttactttaatttaattaatttaatctcgcgatgataccggctggccgacctatatcctcggctggccggtttccttcctctcgctttcattttttgttttatttcccacttatccggttcttcaatatccctgtattttcctaaaccccatcccgctgcattaatttggtgcgaacagtgcattaattttaaccagatgcactttaatgtggcgtaaataaagctctcctgcctttaaactgacttaaagcctatttatctgtgtttacgcactggcatcagcgccgtttgattaaaataaatccgtcatttgttgttaatttgctcacatgattctgtaatgcttgtgtggaatttatctagatgttattagtgattaagacaacatatccagatgtttattctgggaatggtataaatgttaattttatgtttctttctgcgggttgtgcgaaatttcattagttcaattttttccttccctctgaattaatacagttaaatcagattgttgtgtaacttgttgggtggagttaatactatgaaagattactcactcaatgtaagaaaagagaattgcttaacatttctgtaaaaattattggcgtagattttctgcttctgttagctttcgaaccacttccgaatgagatttttctgtgttctctgcaaaaaatgagcatggatattgcaaggaaatgagcagtgcagcgcggtattggctccagactgaccctaaccattaaaaaaaacatcataaatttggaaaaaggactattggacatgcagataaatttgaagcgtaagccattaacagtacttagcactattctgagtttatcttttccttgtatggtcggtgccgcaactgttcctgccggcgttgaattagccgcaactcaatccatcaccattaataacggcgcagaagttgcgtcgctcgatcctcataaagttgaaggcgttgcggaaagcaatgtgattttaaatttgctggaaggtttggtgagtaatgacgccgatggccatattatccccgccgttgcgactcattgggaaaataaagattttaaggtttggactttccatctacgggatggcgcggtttggaatgatgggtcgcccgtgatcgcagaagattttgtgtacagctggcagcgtttggctgatcctaaaataggttcgccttacgccagttatttgcagtacgctcaaattgaaaacgttgacgatattttaaaaggcacgaaaacgccgggcactttaggcgttaaggcattggatgctaaaacgctacaggtcacattaagtaaacccgtaccgtattttgtcagtatgttatcgcatacttcaatgaagccagtgaatcgggctgcggtggaaaagtttggcgataaatggactttgccgggaaactatgtcggcaatggtgcatacaatctgaaagattgggtggttaacgaacgcattgttattgaacgtaatcctacctattggaataataaagcgacagtgattgatcaggcgacgttcttgccaatagcctctgaagtgagtgatatcaaccgttatcgtagcggtgaaatagatattaccagtggtgctatcccgccaactttattcgccaaaatgaagcaagatctgccaaaagaagttcacgtaagcccttatctctgtactttctattatgaaattaataatggcaaagcgccgtttaccgatgcgcgcgtgagaaccgccattaaattgacgctggatcgggatgtgatcgccaataagattatgggacaagggcagatcccagcttacggatttacgccaacgtttatggaaggggcgaatttcacattgccggagtgggcgggttggtcgcaagaaaaacgtaatcaagtggcaaaacagctattggccgaggctggatataacgataaaaatccgttgaagttcaatttgctctacaacacatcggatcagaataaacagcaggcaattgctgccgcatctatgtggcaaaagaatctgggtgccaaagttactttgcagaatcaggaatggaaaacttcgctagaaagccgccatcaaggtcaatttgacgtggctcgagccacgtggtgcgcggattataatgagcctagcgccttcctgaatatgctgttatccgacggtagcaataataccttcttctataaaagccctgaatttgacgctattttggctaaaacgctgaccgcgtcggatgaaaaagcccgcgccacgctataccaacaggcagaaaatttactggataaagattcggtgatggttccggtgtattaccgggtcagcgcccgacttattcggccaacggtaggcggttttagcggaaaagatccgcaggacgctaccgatataaagaatttgtatatccgtaaactctagcagagtcagtaatatcgtagtaaaaacaatgatggcagtgaaatagggatgtatgacgcagcgtcagtgcggtgttaatacatgtggggtcttacttcctgtggattcgttcctccataggggtaaataaaaaatgccttttaaaaggtgaggcgtattcagtcactggataacgcaataataaaaaactggagttaagataagtatgaccaacatcacaaagaaaagtctcctggccgcaggtatcatcgccgctttgggtatagcgtcggtcagcagcagtttcgccgctgacgttcccgccggcgttcaattggcagaaaagcaggttttagtccgtaataacggttctgaacctcagtctttggatccgcataaaattgaaggcgtgcctgagtcaaacctgtcccgtgacctgctggaaggcgtagtgatcaactcgccaaacggtgatattgttccgggtgtggcagaaagttgggataacaaagactttaaggtctggactttccatctgcgtaaagatgctaaatggtcaaacggtgaccctgtcactgcgcaagacttcgtttatagctggcaacgactggccgacccgaaaacggcttccccttacgaaagctatgtgcaatatgcgcatatcgcgaatatcgatgacattattaccggtaaaaaacccgctgacacactgggcgtaaaagcgctggatgatcatacgctggaagtcactttaagcgagccggtgccttacctggccaaattgctggcgcacccgtctatgtctccggtgaataaagccgtagtcgagaagtttggcgacaaatggactcaaccaaagaacttcgttggcaacggtgcttataaactgaaagactgggtggttaacgaacgcatcgttctggaacgtagcccaacctattgggataacgaaaaaaccgttatcaatcaagttacttatctgccaatttcttcagaagtgactgatgttaaccgttatcgcaccggtgaaatcgacatgacctataacaacatgccgatcgagttattccagaaactgaagaaagagatccccgatcaggtacatgtagatccttatctttgtacttattactacgaaatcaataatgcgaaagcgccatttaccgatgttcgcgtgcgtgaagcattgaaattaggtatggatcgcgacgttatcgttaataaggtgaagaatcagggcgatctgccagcctttggtttcactccgccttataccagcggtgccaatctgaagcagcctgagtgggcgagctggacacaagaaaaacgtaatgaagaagcgaaaaaattgttggccgaagccggttataccaaagataaaccgctgacattcaacctgttgtataacacttctgatctgcataaaaaattggctatcgccgctgcgtctatctggaagaaaaatctgggtgtggacgtgaaactggagaatcaggaatggaaaaccttcctggatacgcgccatcagggcaatttcgacgtggcgcgtgccggctggtgtgccgattacaacgagccttcttccttcctgaatatgatgctgtctaacagcagcaacaataccgttcattataagagcccggcctttgacaagctgatttctgatacgctgaaagtgaaaactgacgaagagcgagcggcgttgtatcagcaggcagaaactcagttggataaagattctgccatcgtgccggtgtattactacgtgaacgcccgtttggtgaaaccttacgttggtggctacaccggtaaagacccgctggacaacttgcacgttaaagatctttatattatcaagcattaatcattttgagggcggtttcctatgggaaactgcccttattgtttcgataatataaagccgtagtaaaaggctaaagacacaggtacgggcaatgttaaagtttattttacgccgctgtttggaagcaattccgacgttatttatactgattactatttcattctttatgatgcgtcttgcgccgggaagtccatttaccggtgagcgtaatcttccgccagaagtcatggccaatattgaggcaaaatatcacctcaacgatcctatctataagcagtatttcaactaccttggccaattggcgcaaggtgatttggggccttcattcaaatataaagattataccgttaacgatttggtggccgcgtctttcccggtttccgccaagctcggtcttgcggcctttattttggccgtggtgttgggggtgagtgccggcgttattgcggcgttgaatcagaataccaaatgggattatacggtgatgggctttgccatgaccggggtagttatccccagtttcgtggtggcaccgctgttggtgctgatttttgccatcatgcttaaatggttaccgggtggcggttggaacgggggcgcactgaaatttatgattctgccgatggtggcgctttctctggcttatatagccagtatcgcgcgtattacccgcggttcgatgattgaagttctgcattccaactttattcgcaccgcgcgagccaaaggtttgccgctacgtactattgtattccgccacgcattaaaaccggcgctgttgcccgttctgtcttatatggggccagcgttcgtgggtattattaccggctctatggttattgaaaccatcttcgggttgccggggattggtcagctgttcgtaaacggtgcgttaaaccgcgattattctctggtgttgagtttgacgatactggtgggcgcgttaaccattttatttaatgcgatcgttgatgtgctctatgccgttatcgatccaaaaatccgttactaacactggagctggcctattatgttgagcaaaagaaatagcgaaacgctggaagctttcagtgaaaaactggaagtagaagggcgtagcctttggcaggatgcccgtcgccgttttgtacataaccgcgcggcgatcaccagtttggtggtcttgatgttaattactttatttgtgattctggctccaatgctgtcgccatttgcctatgatgataccgattgggccatgatgtcggccgcgccgagctttgaatccggccactattttggcaccgattcctctggccgtgacttactggttcgtgttgccatcggtggacgaatctcgctgatggtcggtgtcgcagcggctctggtcgccgtggtggtcggaactttgtacggttcactctccggttatctgggcggaaaaatcgactccctgatgatgcggttgctggaaattctgaactccttcccgtttatgttcttcgtgattctattagtgaccttcttcggacagaacattttgctgatctttgtggcgatcggcatggtttcctggctggatatggcgcgtatcgtgcgcgggcagacgctaagcctgaagcgcaaagaattcattgaagcggcgctggtgggcggcgtatcaacccgcaatattgtggtgcgacatatcgtccctaacgtattgggcgtggtggtggtttacgcttctttattggtaccgagtatgattctgttcgaatccttcctgagcttcctcggattggggactcaggaaccgttaagtagctggggcgcattattgagtgatggagccaactcgatggaagtctccccttggttgctgatgtttccggcgggattcctggtgattacgctattttgtttcaattttatcggcgatggcttgcgtgatgccctcgacccgaaagatcgctgaggaatattgccatgtcgattacgaataatcagtctgccaatccacagtccgttttattggatgtgaaagacctcagtgtgactttctccacgccggatggcgatgtgacggcggtgaacgatctgaacttcgacctacgtgctggcgaaaccttgggtatcgttggtgagtctggttcaggtaaatctcagaccgcatttgctctgatgggcctactggccagcaacgggcgtattggcggttcggccaaattcaatggtcgggaaattctgaatctgccggaaaaacagctaaaccggatgcgggcagaggaaatctcgatgattttccaggacccgatgacatcgctgaatccttatatgcgcgtcggcgaacagctgatggaagtgctgcaactgcataaaaagatgagcaaaagcgaagcctttgaagaatccattcggatgctggatgcagtaaaaatgccggaagcccgtaaacggatgcggatgtatccccatgagttttctggcgggatgcgtcagcgagtcatgattgctatggcgttgctgtgccgtcctaagttattgattgctgatgagccgactactgctctggacgttaccgtacaggcgcagattatgacgctgctgaatgagctgaaaaacgaattcaataccgcgattatcatgattacccatgatttgggcgtagtggccggtatctgtaataaagtattggtgatgtatgctggccgaaccatggaatacggcaaagcccgcgacgtgttttatcatccaagtcacccatattccattggtttactgaatgcggttccgcgtctggacgctgaaggcgaatcgctgatgaccatccccggcaatccgccgaacctgctgcgtttaccgaaaggctgcccgttccagcctcgctgtcagtacgccatggaccgttgctcaaccgcaccggaattggagcattttggtgaagggcgcttacgcgcttgctttaagccagtgggggaattggtatgaatacagtgacagataagcgcgttttgctcgaggtcgccgatctgaaagtgcacttcgacattcaggatggcaaacagtggttctggcaaccgtcgaaaaccctgaaagcggtggacggcgtgacgctgcgtttatacgaaggggaaacccttggtgtagtgggcgaatccggttgcggtaaatcgaccttcgctcgcgccattatcggtttggttaaagcgaccggtggcagcgttgcctggttagggaaagatttgctgaatatgagcgacgccgagtggcgtactacgcgcagcgatattcagatgattttccaagacccgctagcgtcattgaatccgcgaatgactatcggcgaaattattgccgaacctttacgcacctattaccctaaaatgccacgtcaggaagtgcgggataaagtgaaggccatgatgttgaaagtgggcctgttacctaacctaatcaaccgttatccgcatgagttctctggcggtcagtgtcaacgcatcggtattgccagggcgctgattctggagccgaaactggttatttgtgacgaaccggtatcggctctggacgtatcgattcaggcgcaggtggttaacctgttgcagcagttacagcgtgagatggggctgtcgttgatctttattgctcacgatttggcggtggtaaaacacatttccgatcgcgtattggtgatgtatctcggccacgcggttgaactgggtacctacgatgaggtgtaccacaatccgcagcatccctatactaaagcgctaatgtcggcagtacctattcccgatccggataaagaacgggacaaagtgatccaactattggaaggggagcttccttcgccgatcaacccgccttccggctgtgtgttccgtacccgctgcccgattgccgggccggaatgtgctaaaactcggccgttgctggaaggcagcttccgtcatgcggtttcctgcctgaaagttgatccactgtaatcattccggcggaatatcattgagaaaaaaaagccctgttagttcaattgctaacagggcttttctataggtaaggtagttcattagcctgagactaaatgagtgcctgacttactctttccacagaatatggcagagtttatggtctttttctcggcacaacagaacgcgggcaaagacgtcattaaccggttcgccttcgctctcggccagaccgatgaccacttccgcgaaaaaatctggattcaggtcaaaatcgacgtgctcactccagtcttcggcgggatcgaaaagctcagccgcaccgcgttcctcaaactgcaaattgaatagcagaatatctgccggatccagattgtcgcctgccagctcaagaaaaatatcgtaagcctgttccagcgtttcgtcttcgctcaggcggttgttgaggtccataatcgtctggtccatgtgcaggttcccattagtcatcgcaatattgcccacattaaaacattctctttgcgccttttacacactttatagcgcttattgccaataactaagaatttctacaatacgataatcattactaagcaacattattacaggaatggactgaagaaatagaacagacgctccatcacccgatgccagagtggccgtttggcccaaacttcaccgtccaacaacgttgagcgagcgatataatcgtcctgaacctgagacaaatcattaccgaaaccggcatcatcgatcaccaacgtgatctcaaaattaagccacaggctgcgcatatccagattgaccgtaccgaccagacttagctgtccatcgaccaaaacgctcttgctgtgtagcaaaccgccttcaaactgatgaattttaacgccagcctccagcaattcggcgaagaatgcgcggctggcccagcggaccatcatggaatcgttgtctttcggaacgataacactgacgtctacgccgcgctgcgccgcggtgcaaatagcgtggagcaaatcgtcgcttggcacgaagtagggggtggtcatcaccaattgttcacgggcggcataaaccgcggtcagtagcgcctgatgaatcatttcttccgggaatccagggccggaagcaataacctgaatggtatggccggactcctgttcaaacggcatgatattggcatcgggcggcgggggtaaaatacgttttccggtttcgatttcccaatcacaggcataaactatgcccatagttgttgctaccgggccttccattcgcgccatcatatcgatccattgacccacacctgcatcctgtttaaagaaacgcggatcaaccatattcatactgccggtataagcgacaaagttatcaatcagcaccaccttacgatgttgacgtaaatccattcggcgcaagaatacgcggaacaaattcactttcagtgcttcaaccacttcaattccggcgttgcgcatcatagcgggataagggctgcggaagaaggtcacgcttccggcagaatccagcataacgcggcaatgcacgccccgacgagcggcggccattaaggattcagccacctgatccaccagtccgccgggttgccagatatagaaaaccatttcaatattatgttgagccagatcgatatcgcggatcagcgctttcagcgtgtcatcggtggtggtcaacaactgaagttggttgcctttaacgccgctaatgccttgacgacgttcgcaaagttggaatagcggcgcggctacctcgctgttttcggtggcaaagatatgctggcattcttttaattcacttagccaatgagcggtggaaggccacatggccttggcgcgttcggctcgtcgtttaccgagatgcagctccccaaacgataggtaggcgataatcccgaccaacggcagaatatagatgataagcaaccaggccatggaggaaggtactgcgcgtcgcttcatcaggatacgtagcgtaaccccggcaataagcagccagtagccgaagaaggagagccaactgattacggtataaaatgttgtcataaaagcgagaagtcctgttcgcaaacgttcatcactgagtgtacgcacagtaatgaaaaggggaaaccattaactcgatatattcaactataaattctttcagttaaaaggacttgcgtccatttgtgttcttataatcttagcgggtttctcgtcaagcgtgaataaacctgcgatggaataagataactacgaattcctatttcctgcggacaagtacttggcggctgagccgaaaggtctataatgagccggttctcagctttggaagaatagtttcatgagacgtagtaaaaatgaagttggccgttggcggatgcttcggcaaaatcaacgtcggcgtaatcgctggttggaagggcagtctcgtcgttatcgtcatatatatagcgtgcgccagattcacgtaaatcagcatcgccgggcgttgttgtttagcgtggcttatgagtggcagtaaatgacgagaataataagaacggtccctttgtggggctgtttttatcttgttttaatatatcttacaaatagactctgagtattttggcttcattttttttgcgcggaatctaaccagatgaagtgggtataacaatatttttccgatatttcttgaacggatttcacttctgagcaaagtcgcgttaatatatatacatggtcgctttgtgactagaggtcagtttcaggggtgttactgagcgatagcataaagcggccgacctttcggcgtaatatttagccatttattcaagtgttctttctttattaattctcgaattatttcctgtatcatgctgttttttatggatttaatatccaatgatgacggattcaattgcggttttatatcaatgaatgctatctgaaatattttagaattcactattcctttgtgcaagattaatctgaaggtttaatgaaatgtcaatgtccatatcagcctaaaaataaatattgctactcttttcttgtgccacggacaataaatcagacaattaacttttagcctaatctgctggcaatcgtcttcaatgcgtagccaaaaataacgttatcctagctattgttatatgttttcacctgttctattgagggcgatcaaagatgaatcaaccgcttatagtcttagacccaaaccgtgtaaagggttctacagataagtccagtttaaaatcaggtgttaattaaataaaacagaaccggtactagaacgattgaccgaaatctcgttttcatgcgtggaacgataataataaaaattagtgaagatacgactattgatctgaagccggatccggataaaccctcgacgcaactttaaaaattgagttatttcaaagccgttactgcggttatgccgtgatcatcacagatgtaattatcaaatcggtggagactggctcttccatttcagcagagagtgtattttctatgtctcgatatattttggctaaaacggttttctttggaaatttgcaaaagagtgacgcgctttacaagtatgagatttacagcgatcgggctgaaactgtgttccaaaccactatttatgctgaacagactatgactcaggggaaacacagttatagtttgtgggtacggaaagatcatcgcattttgaaggctgcgcctcacgatcttgaacaggccgtcgatgcgtgcgaggaacattgggaaaaaacctacgcgaaccttaaataatcgctgacattttgttttcacaaaaacactgttattggcagacattgtgggcagctgccaataacgccggtttgagtggaaacaacatccaaggatatcaatgcaattaccgattaaaaccttaagacttctgctacgacgctttactccagatgatttcccttcttatcaggcctatcactcactggcgtcggtttatcgttatctctattgcgctccggcggatgatgccactcttcgggcaaatttactgcaggccactgaatgccgttttcaggaacagggagataccttaaccttggccgttgaacgtgtggacaccggcgagcatattggcgaagtattgtttaaactgtctaataaaccggcagctcaggctgaggttggttatatatttaatccaaagtttagcgggcagggctttgccactgaagcggttcaggccatgttgaatatcggctttacccaacatggatgccatcgtattttcgctcggttggatgcattgaatatcggctcgataaatgtggtcgagcgtttgggaatgcgcaaagaagcgcatctgatacaaaacgactgttttaacggcgtatggggcgatgaacttatttatgcgcagctcaaacgtgagtggctggctaattctgcccgtcaggattaggggaaagatatgcaggccgtgttcgctagatccttaccaactgtgtcggtgcaataataaaggaggctcgaatgttagataattactttggctctgggaatctcccaagcgatcagcaaaaacaacggctattggcggtacaggctgccttagaaattattaaacaatcggttggtgccagcgaaggggctgcttattcgcgcgttaatgacgatatgaagcacgctgtcgagtggctagcgccactggccgatgccattcaacaagccttgattgtgaagaaatagttttattctagggtcttatcagaacagcggttatcgatgagacccggattagtatgaggggtataacgccaggactcacgtaaacgggctacaatgctctattcttcgtacggttaatcagcaatacatgaataatatttaattaggattttattgcgcgctttatttaagtaagaaaaagttaattaaattggtctaatgaattcacggagagtaagactaaaacagttaatttcccacatatattatatgggcgaaagaaatgactttttaaagcagctgcagtcaataggccacacagttaatctgtcgatttaatccgccggtaaattcaaatactcatcagaatacttgtttaaaaggttttacaatcaccgattgataaacgccggccgccacatagggatcttgttctgcccaagcttgagcttcggccagactttcaaattccgcaataaccgttgaaccgctgaaacccgcggcgcctgggtcatggctgtcgatagcaggatgagggcctgcggttaataaccgcccctgatcccgtagggtttgcaaacgcgctaaatgggcagggcgaacggacaaacgctgtgccagagaatcgggtacatcggttgagaaaattaaataaagcatcgtatcaccttaaaaatcagaccgataaatgagtaataatcgaatattcatctgaccatgttcagtgattaaattcaacccgcgaacataattttggttatttgtttttactcaaccgataatggcaggttatcagtgctgaaataaaatgataattaactgtcaacagaaagttttatcattctgagatcgcagctaaaaacatcatttagtgccgattgaagcaattgtttgccattgcttattgaatatgattgctatttgcatttaaacttggcggcatcagaggatattgaatcactatgcagctaaaaaaacttttaccggttcgtcggcttacatggccagtagcattttctctcgggttgcacggcagcgttattgctgcattgctttatgtctccgtcgaggaaataaataaacaacctgaaattgaagatgcgccgattgcagtgacgatggttaatatcgccacatttgctgctccgcagcctgcggctgccgaaccggaaagtcagccggagcccgtagttgaggaaaccccgccagaacctgaagttttgccagaaccggtaccggttcctttgcctaaacctgagccagtgaaaaaggaagtggttaagccgaaacccaagcctaaaccggtgaagaaagaagtgaaaaaaccggacgtgaagaaaatcgagcagccgccaacggaatcgctgtttaaatccgatgaaccgaccgcggtgacccaagcggcgccggtgaaatctgcaccgccagcctcggtgcctggctcgtctaacactgctggtcctaaagcgctgagtaaggcaaaaccaacttatccggcgcgcgcactggcgttaggcgtggaaggttcggttaaagtgcaatatgacattgatgaaaatggccgcgtgaccaacgtgcgtatattagaagccacaccgcgtaatacttttgaacgggaagttaaacaggtgatgagaaaatggcgatttgaggccgtagcggcaaaaaattatgttaccaccattgtgttcaagattggcggtgatatggaaatgaactgattgggttatttcccataagttcgtccggttatacgtttttgcagtgtctatgtcagtatctatgtcgccttaaaaagggtcgctttggcgaccctttttaagggtagaaactgaagctaaaaagcagcgggaaatgattactgcccggagccaacttcaaaattaatctttcccgcgggcagtgggcgagatttgccttcatcatcgaccgccacgtaagtaaataccgcttcggtagcgcgataacgctgaccaataggttctgatgaaactttcttaacccacacttcgacattcactacgatggaactgcggccagttttaatgcaacgagcgtagcagcaaactacgtcgcctacggccaccggcttgaggaaggtcatgccgtccactcgtaccgtcaccactcgaccgtgagctatttcctttgcctgaatagcgccaccaatatccatttgcgacatcagccagccgccaaaaatgtcgccgttcgcgttggtgtcggctggcattgccaaggtacgaagtaccaattccccgttgggtaaaagttgctgagtcatctctgtcttcttataaaaagtaaattcatacaataatggctcgcccagaacggcgggcgagcatcaaatcaatcttaggattttttttgttctgttggcatatggcgataaatatacacgccgcttatcagggtaaagaccagcgttaatgcggttaaaccgaatactttgaagtttacccagatatcctgcggcaaccagaaagcgacatagatattagccagaccgcagaccaggaaaaacatcgcccaggccagattgagtcgcgaccatacgctatcaggcagggttaactctttgcccagcatgcgctgaatcaagggtttcttcaggattaactggctgatcagcaaggcaccggcgaacagaacgtaaattaccgtgactttccatttaataaactgatcgctatggaaggccaaagtcagtgaaccaaataccacaaccatggcggcggtgaccaaggtcattttctcgaccttgcggtacatcacccaacttatagccaaagccaacagcgttgcgacgatgagtgcgcccgaggcgacgaaaatgtcgtacatcttataaaaaataaagaagacgaccagcggtaggaaatctaaaagttgcttcattaatcaatccattttctgtacatcaagtgactataccggattcagcgatgtgagggtacagtgggcaaaccgttattatccctaattatcagccggaatgcgcgggctgccagcgttatttgcagaaacttacgattaacttatctggtagttgccagttgtcgtagaactcagcatgatggactgagactattggtttagaggtagagaagaacagatgctgaggaaatcgctccgttattggatgccgggattaaccctgttaatggcctaccagcgcgaatggctaaaaccggatattcgtgcgggtttgtcggtggctgcggtggcgttgcctattgccatcgcttatgccgagttaaccggcgtgagcgcggcggtggggctatattcctgtatcttaccgatgattgcctacgcctttttcggctcttccaggcagttaattgtcgggccggatgcggcaacctgtgcggtgatcgcggcagtcgtagcgccgttggcggcgggaaacaaagaggttcattggcagttaaccataatgatgacgctgatgatggggagctggtgtctggtggctagccggttcaagctgggcgcgctggcggatttgctgtcgcgaccgattctgaccggtttgttaaacggcgtggcaattaccattattgtcgatcagttgggcaaagtgtttggttttatgacccggccgccacagctgatagagcgggtgctggcgctgccgcacaatattctcaacagtcatttacctacgctggcgatttctatcctgactttcgccattctattcggcgtgaaatgggcgcgccccaactggcctgcgccgctgctggctatcgtaatcgcgacttttgttacctgggccggcggcttacagcagtttggcgtggaagcggtgggcggatttaacggcggtttgccgatagttagctggccggaattcaagccgggcttgctgcgcgatatggtgattccggcgcttaacctcgcggtagtcagctttgtgagtatgatgctgacggcgcgcagctttgctaccaaaaacggttacgaggtcgatgcagatgttgaactacgcgctttgggcgtgactaacatcgtttcggcgctgtcgcagggctttgccatcagcggagccagcacccgtaccgcagttaacgatgccaaccacggtaagagccaattggtgtcgattattgccgcgctagctattgcgttggtgctatttttcctcaccgcgccgttgcagtttatcccagtagctgcgctgggcgtggtgttgatctacgcggcttggtcactactgagtttcaaaggcatctggcaactgcgaaaaagaaatacgcaggcgttcagtctggcgatttttacctttggcagcgtagtgctggtgggcgtcatcggcgggattgggttggcggtattactggggttactgcagtttttacgtaccgttttccgcccgacggagcaactgttgggggtgaattcagaaggcatgattcactcgatgggtaacaataacggtattaaagcggtgccgggggtaatgatttaccgtttcaactcgccgttaacctatttcaacgtagcttactttaagcgccgcatccttaacttggtggactcaacgccacatcaggcagactgggtggtgatcgacgcggttgccagtttcacctacgccgatatcagcgtgctggcggctattgatgagctaaaacgagacttaaaacagcgcaatgtcaaattggtattggcggggcgtcgcactgagttaacgcgttggttccgcctgaatcgcttaaaaagtcaggataacgatctgattttagtaccggatttgtatctggcactcaagctgattcaaagtaaaaaacgggttgaggaacgaaccgaagcggagcaactggaaggatcgtcctaaattagttgccgagcacaaagtgacgcggtcgagggctgaccaccatgtttcttccgcctcgatttggcggtttcttttgttggtcataacattggcagtaaaaaagggcctgagcggcccttttaggtttctatatgatgacgttatgctttacgcaacaacatatataagcggaacagataaaccagcagcagtgccgagaccagattgctcagggtgctcagtaccacggtggcaatggcaggtggcagcgcggcaaggtggccggccagatagagcaaaatcagcttggctgccagccacaacattaacgccggaatcaccaaacgcacgttagcaaaggccagtttggcactggctttcattgccgcaaatacgccgattttttcgttggcgaccatcaccggagccagacataccgcgaccgcaatcaccacgcccggcacaataaacagcgccaaacccagttgaatcagtagggtacagataaacaacaataacagcagacgcggcagaatcggcaaggaaagccccaccgcctgcaatgcgctgattcggctgccctgtgagacggcagaaattagcgtcagcattccaccaaccagcagtagattaccgatcagtgcggagaaggtcgccaccgcagagactttgagcaacaccatttgctgttctggcgtcatttgcgacaccatttcgcgaattcccatggtgcttgaagaagcgatatccgtatcaccagcattcaaaatcaacaattggtctgcatcaggaataaacgcctgattcagcatgacggtaataaacgcagtcaataacgccaataacagaatggcggcgagctgattgcgaaagaaattaaaactgtcacggtacagagtgttcgccgtgataggcatgaaggctccttgggataatcgataaaaataactttcagggaaggattataccctgttatgcgcgttctgtgaccctgtgatcaacaggctacctatttcctcggcggccaattgctcaaattcttcaacaggtaacggcggtaagccgtaataggctctggctcgatcgcaggattcattgcgttggttattttcaccagaataggaaaattcatggcagggagtgggtcgatccggataaatgctacaggcgacctgttggccgatgtcaccctctagggcgacgcagcgcggcgatttgcagttagtaccgctcatgcagctaataaaaggggtgatttgctcagtcaggtcattgggcactgagccttgttcgctgcccgcttcggaccaatagaaggaaacacgaaaataggcgcagcacgcgccacagctaatgcaagggttgataacagcgctcatcttgaactcattcgctcctgtataaataaaaaatataggacagccaaccgatcacgaattcacacaactgataacgcctgacagcattacctacctccccctgaggaatcaatggttatttaaccaacagcaataaatgaaccattcacccctttcttgattcagatcaattccaacgtttttaaggaattaaataaccttacgcaaaatgttattttttaaaacgacgttaaaagttgtgatccggattggatcataactacgcatttataggtatattctgcctcactataaaccatacaaatggaatggataatgaaaaaggtatgtttgttattactggctgcggcaactctggctccgtctttggcatcggctcatcaggaaggtgattacatattccgtgcgggtacggcaacggtacgaccaaatgccggttcagatgacgtattgggacaaggttctttcagcgctgacaacaatacccaactgggcctgactttcagttatctggttacggacaacatcggggtggaattactggctgcgacgcctttccgccataaaattggtttgggcgcgatgggcaatatcgctgaagtcaaacaattgccgccaaccttgatggcgcaatattactttggcgacaaacaggacaaactgcgtccttatttaggcgtaggtctgaactacaccactttctttgatcaaaaattcaataataccggcagcgaagcaggcctgacggatttgagcgtgaaagattcctggggtatcgccgggcaggcaggtttggattatatggtcagcgaaaactggatgctgaacatgtccgtttggtggatgaatattgaaactgacgtgaaattcaaagcggcggggcaagagcacactatcaatacccgtctggatccttgggtattcatgtttggcgcgggttaccgcttctaatttatctgagcgatatggcacaaaacagaggaggcgcattgagcgcctcctttttcttatatgacttataatgattgactaagacgcgtattaattatcgaattctcatatcgtttgctacagatttgacaccgggtacggtgcgggtaatctgtacggcgcgatcagcttgctggctggagctgacaaaaccgctcaactgtacccggcctttaaaggtctcaacgctaatttcagtcgattttaggttcttctcacccagtaacgcggtttttactttcgtggtaatcactgtgtcatcgacataacccccggtgccttcggttttggccgtcggagcacaggcggatacggctaacgccattacggcggcaatacataaggctgaaagggttttaaatagcttcataagttactctccatgtcctgccaatgttaaaagaacgttcactacaaagttaatagctgaaactttaatcgtgttaaagcggtcattgtgttgagaagaaaataatgttgaaccaaaaataacgacacattcagtaccatcagcgacgccgaagtgattcggaatagggcaattgatcgttcgcatgtgcagttaagtattgattatgaatagtgattgagcaaattagtacgggcaatttggtgtggaaagagactcattaaacctaaataatgcccgatctgacggatcgggcatgccgtattaacggcgagtggcggccttcattttactgacaaatcgagatagctgcgccagcatttctgccggttgcactaaattgttttcgataattttcacgatggccgaaccggaaatggcacccgcggcaccggcatccagcgaggcttttacctgttcaggatcggaaattccgaatccttgcagcgccggagccgcatgatattcatgcagtttatccaccaaatgattgagcggttgctgcgcccgattttctgcgccggtgacgcccgcgcgggaaagtaggtaagtgtagccgcggccgtgggaagaaatctcccgcagcaggtcatcgctggcgttaggcgggcagatgaagatcggcgcgataccgtggcgcagagcggcggcgcggaaaggggcggactcttcaaaaggcacatcggcgattaataccgaatccacgccgacttctgcgcagcgttgatagaagttatctatgcctttgttgaagaccagattggcatacatcagcaggccaataggaatattcgggtgttttttgcgaatttccgccagcatttcaaaacactgggttggggtgactccggcggcaaaggctcgcagggccgcattttgaatcgttgggccatcggccaaaggatcggaaaaaggaatgcctaattcaagagcatcggcaccggcggcaatcaatgtatcaatgatcgccaatgattgggttggcgatggatcgcccagttgcacaaagggaacgaatgcgccttctttacgtgcatccagttgtttgaaaagttgctgatagcgttccatcaaatttctccccgtgctttcaaaatatcgtgaacggtgaaaatgtctttatcaccgcggccagagagattcacgaccagaatctgttttttctctggcgcggcgttaatcattttcagggcgtaggccaatgcgtgggaggattccaacgccgggataatcccttctttacgagagagagccttaaaggcttccagcgcttcatcgtcagtgacggaaacgtattccgcgcggccaatgctgttgagataagcgtgctgaggcccgacggaagggaagtccagaccggcagagatagagtaagattcttcgatctgaccttcggaagtctgcatcatcggtgatttcataccgaagtagatgccaacgcgaccatgttttaacggcgcgccgtgctgaccgctttcgataccgtgaccggcgggttcaacgccgatcagaccaacgttttcttcatcgataaaatcggcaaacataccgatggcgttggaaccgccgccgatgcaggcgagaacggcgtcgggcagacggccttcgcgcgccagaatctgcgctttggtttcttcgccaatcatgcgctggaattcccggacgatagtcgggtaagggtgcgggcctgcggcggtgcccagcatatagtgagccttttcgtagctgccagaccaatcgcgcaacgcctcgttgcaggcgtcttttagagtagaggagccgctgtgtactggaatcacttccgcacccatcaggcgcatacggaagacgttcggtgactgacgctcaatatctttggcgcccatataaatgcggcatttcaggcccaacagggcgcaggccagcgccgacgctacgccgtgttgaccggcaccggtttcggcgatgatttcagttttgcccatgcgtttggccagcaaggcttgccccaatacctgattggttttatgcgcaccgccgtgcagcaggtcttcgcgcttcaaatacagcttggtattggtgccttcggtgagattctggcacagggtcagggccgttgggcgaccggcgtaattttttaacaaatcatggaattgcgcctgaaactcaggatccaactgggcgctgacaaaagcctcttccagttgtaccaatgctggcatcagaatctgcggcacatacataccgccgaattcaccaaagtaggggttaagtctggtcattatcctgtccgttattcgtaggtttatcgggttcacccatagcaaagctattttaataagcgcgtaaggtctggaacgcagcggcaatcttgttcggatctttgattccggctgcgccagccacttctacgccggagttaaaatccagcccggcacagccaagcgtagcggcaatggcgcagttttcggcattcaggccgcctgccagcagcacgttatccaacggctgttgattcaaaactgaccagtcaaaacgttggccgctgccgcccgcgccgttgtctagcacatagcgatccacagaggggatatcgcgggcgggcagggaattaccgacgctaaccgctttccaaatctggcagcttgccggtaacaattctcgcagtttctgaatatagtcccgatcttcgttaccgtgtaactgaatcgccgctaatgccagcgcttcgacactttgctgcacggtttccagcttggcgtcgcggaatacgccgacatatttcagcggcgcggcgctgatgacggcgcgggcctgtgccatatcgatatagcgaggggaactgccgacgaaaatcaatccgccgtacactgcgccagcgctataggcggctgcagcgtcctgcggacgagtaaggccgcaaaccttgttttccccgagcaacacccgacgcactgcggcattcaggtttggttctgacatcaaagcgctgccgatcaggaaaccgttagcaaattggctcagttcccgcacttgttgataggtattgataccggattcgctgattaccgtgacgccggctggcagacgtggagccagctgtttggtgcgattcaggtcgatagacaggtcgcgcaggtcgcggttgttgatacccaccactttggctcccagtttaattgctcgctccagctcttcttcattactggcttcggtcagtacgcccatattcaggctgtgagcgacggcggctagctcccgatagcgtttgtcgtccaataccgatagcatcagcaatacggcatcggcttgataaaaacgcgccagaagaatttgatattcttcgataataaaatctttgcacagcaccggctgagtgaccgcagcgctgaccagaggcagaaaatcaaagctgccttgaaaatatttttcatcggtcagcactgaaatggccgaagcatagttggcgtaaaccccggcgatctccgccggatcgaaattctcgcgaataacccctttggagggggacgcttttttgcattccaggataaaaacggtgttatccccttgcaatgcctgatagaaactgcgctgacttggcgtcaccagatgttggaaactggacagcggctgatgtagcttgcgtgcggcgacccagatttctttgtcgcgaacaattttgtgaagtatcgtttcttgcatgatctatcctctcgctgccagtgcgataactcgctcaaaagctttgccgctatgaattatttccatagcctgatgtgcgttttgacgtaaattctcctgcccgtttaatttcagcaacagcgccacgttagccgctaccgccgccgcgtgggcaggttcgcctttaccttgtaacaacctcgccagaatgtcacgattttcttccggtgagccgccctgtaaggacgccatcggataggttgataaaccaaagtctttcggcgtcagttgataggtttggatcttaccgtttttcagttccgctacctgagtgggtgcgtggatagccacttcatccattcctccaccgtgaaccactgccgcacgttggtaacccagcactcgcagtgtttcggcaatcggcaacaccaattccgggctgtataccccgattaacgccagcggtgggcgcgccggatttatcaacgggcccagcacgttaaacagggtgcgggttttcagctgttggcgtaccggcatcgcgtggcgaaaaccggtgtgatactgcggtgcgaacaggaaacaaatccctaattcatccagcgcctgacgagattgctcggcggtcaaatccaaacgaatgccgaaggctgccagcaaatctgaagatccagaacggctagacacgctgcggttgccgtgtttggctactttcatcccgcagctagcagccacaaaggcgctggccgtggagatattaatgctgttagtgccgtcgccgcctgtgccgacgatatcggcaaaggcgtaatccgggcgagggaatggctgcgcgtcggccaagagcgcctgtgctgccccggcgatctctgccggcgtttccccccgaactttcatactgattaaagtcgccgccagttggctaggctccagctcgcctcgcacgatggcggtaaataattgctggctttcctgctgagtcagtggctcggcgcggaacagtttttcaaataaattatgcatgatgagttcctgaaaagttacgccaaagcccaggccagagtttgctcgagtaaacgagcgccctgagtggtcaaaatggattccggatggaactggtagccgcaaacccggtgagcatcgtgacgaaccgccattaccatttggttaaaatgcgcgttaaccgtcagttcggcgggaatattgctgccgaccagcgagtggtagcgggcgaccggcagtggattcggcataccggcgaacataccttgttcatcgtgctcaatcgtcgaggctttaccgtgcaggatttctcccgcctgacctacgtagccgccgtaggcttccacaatggcctgatgtcccaaacaaatcccgataatgggaagttgaccgcgtaggcgctgcaataattccggcatacaacctgcttgcgctggcgtaccggggccgggtgacagcaccagcaccggctgagacatctgttgcaagcgctcggtaatggtgtcggcggcgatctggttgcggtaaatcaccactttatgaccgctggcgcgtagctgatccaccaggttgtaggtaaaggagtcaatgttgtcgagcagtaaaatatcggccattagaaaatctcctttgcctgatgagcggtcgcgatagcgcgcaataccgctcgcgctttgttacgggtttcatcggcttcggcctgcgggatggaatccagaacgacacctgcaccggcctgtaccgtcgctacgccgtcttcgacataagccgagcgaataacaatgcaggtatccaaatcaccgtgcgcggtcaagtaaccgactgctccgccatagctgccgcgtcgtgtgccttcgctttgagcaataagctgcatggcgcgaactttgggggcgccgcttaaggtgcccatattcatacaggcctgataagcatggagaacgtccaaatcgtgtcgtagcgcgccgacaacgcgggaaaccagatgcatcacgaaggaatagcggtctactttggttaaatccgctacgtaacggctgcctggctcgcaaattcgcgccaaatcgttgcgtgccaaatccaccagcatcagatgctccgccagctctttatggtcggtacgcatttccagctcgatgcggctgtccagatctcggtccagctcgccgttggctcgacgcccgcgcgggcgggttccagcaatggggtaaatttcgatctggcgattgtccgcgtcgtatttcaaggcgctttctggcgatgcgccgaacagagtaaattcgttgtcctgcataaagaacatgtaagggctgggattgctgtcttttagcgtttgataggcagccagcggcgacggacaaggcagggagaagcggcgcgaaggcaccacctggaaaatttctccggcgcgaatcgcctgctgcaagccgctgactacctgacagtattcctcgtcggactgattgcagttcagtgccatttccggcacggacaccgctggaatcggctgcggaacctgctgcatttgttgcaccaattgcttcaggcgttgctgtaaacggtattgttcctctgtatctggcgtgaacagactggcttgtaaacgggcggtgcggttctggtgatccagtaccagcaaagtttctgccagatagaaacaaaaatccgggcagcgttgctcctgacgcagtggcggcaggtcttcaaatccggcgaccaaatcgtaggcaaacagaccgcctaacagcatggcttcgcgttcgtcggccggtgtttctaccagcgttaataactggcgcaacgcgtcaaacactgacagcgcctgtaggcgggaatcttcgtcctgcatatcgttgatcggcgggaaggtgagctcgcggccgataggacgctcttcgatttttacttgctcgggcaatgctgcatccagcagtggcagcagcgccgcgccgttgcgactcagtgcctgaatgctgacctgacgacctaacgcggtgatgcgcagcgcactatcaactaccagcaagcttttcagattttgcttgctggttatctcggcggattccagcagcaacgttgccgggcgagcgccacacagctggtggaaaagggcggttgggtcgtccctataacaggcttcagccgtgagtagttttaatgtggggcgtactgtttgcattgatttaaccctgattctgtccataaaaaagcccgcgaatgagcgggctgaagcaatctgcatggtctgatgactgatatgcgtgattacaccgcccgaaaaagggagctatgccaccaacgaagtagagaagtcatatagttgttcatcatcagtctctttatgattgcattcagtttatggggctggatcagcttaccgctgtcctcaactagcgtttttttcgctactttacttcaacttattaccgttctggctgaccgctttgtaccgagaatactcttcgatggtactttgctattactcaaccgaattattcgctctgccagtgaactcgtgtactagtaaactagttctaggggttgctgtcaacccctcgatcttgttttttaacgcgctttttcatccacccgcatcgcctttgtcaagattggttaacatctgcagcgggttagcggttatgataggccgcccagactgattcggatcctagctttgactgacaccacaattgaaccgaccgcttttaccctgtatgacctccatagccataccactgcctccgatgggttattaacgccctcgcaattggtggcgcgtgcggcatcaatgcgcgtgggggtattggccataaccgaccatgacaccaccgccggactggccgaggcggcgcaggctatagatgagcaagggttagcgctacggttgattaacggggtggaaatctcaacgctgtgggaaaatcatgaaattcatattgttgggctgaatatcgatatcagccatccagcgatttgcggtttgctgcaacagcagtcagatcatcgccatcagcgagcgatggaaatcagcgcccgtctggagaaagcacgtattcctgatgcttgggcaggggcgaaccgactggccagcggcgggcaggtgacgcgcggccattttgctcgttatctggtggaactgggattcgcgtcgaacgtcggccaggtatttaaaaaatttctggcgaaaggcaagaccggttatgtcccggcgcagtggtgtacaatagaacaagcggttgaagccattcatcagtctggcggacaggcggtaatggcgcaccctggccgttatgatctttccaccaaatggttgaaacggttgttggcttatttcgccgagcaaggcggagacgcaatggaagtcgctcagtgccagcaggcaccgcacgagcgagcccagttggcgcagtatgcgcgtgactatcatttacttgcatcccaggggtctgattttcatcagccttgttcctggattgagctgggccgcaaactgtggctgcccgctggggtggaaccggtgtggcgtgattggcccgtagaagccagccataccgaagacacgttgaacgatgaggtagagttatgagtcaatttttttatattcacccggataacccacagccgcgtttaattaatcagagcgtagacgtgttacgcaaaggcggtgtgattgtttatccaacggattctggctacgcgctgggctgtcgtctggaagaaaaagcggcgatggagcgtatttgtcggattcgtcagctcgatggtaaccataacttcactctggtttgccgcgatctctcggaattgtctacctacgcctacgtagataacaccgctttccgtttgatcaaaaacaatacaccgggtaactatacctttattttaaaagcgaccaaggaagtgcctcggcgcctgatgaatgacaaacgtaaaacgataggactgcgcgtgccgtctaaccctattgcgttggcgctgctggacgtattgggtgagccgctgatgtccacgacgcttatgctgccggggaatgattttgccgaatccgatccggaagagattcgcgatcatttaggtaaacaggttgatttggtgattcacggtggatcccttggccagcagccaaccacggttgtcgatctgaccgaatctgcgccggaagtgattcgtgaaggggctggcgacgcccgacctttccgataattttcctgaaacggtcatatttatcgggtttggcgtttgtccagacccgataatgtctcatattttttccctaaactggccgtcttctggccaccaaacgtcgctacttttctcattccgcctctatcctgagcaaatgctcacgcagaaaaggcgttattttgcccattgctgtggtggctgatgccggcagagacgaatgtgctctgcaacggtgagatttattagaatcattgggcagaaaattagtgtaaaataaccgaccacggactggcttgtgtggctgcctatagggcggatttatcgacatgcttagttctaaaatgtattccaatcagttggttagactcatttcggggtaagcgattgataaaaatatataacacgacgcctgtgaaggcgacattagaggttgctcaatgagcgagaagttacagaaagttctggcgcgtgccggtcatggttcacgccgtgaaattgaagggatcatccaacagggccgcgtcagcgttgacggcaaagtggcaaagttgggcgatcgcgttgaagtggctcagtccaccaaaattcgcctggatggccgcgttctatcgatcactgaatcggaagaagcggtatgccgggttttagcctattacaaaccggaaggcgagctgtgtacccgcagcgatcccgatggccgtccaacggtgttcgatcgtttacctaaactgcgcggttcccgttgggtcgccgtaggtcgtttggacgttaacacctcaggtttactgttgttcaccaccgatggcgagctggcaaaccgcctgatgcacccaagccgcgaagttgaacgtgaatatgccgtacgtgtctttggccagattgatgatgaaaaaatcaaacaactgagccgcggcgtacagttagaagacggcccggccgcattccgcaccatcagtttccagggtggggaaggtttgaaccagtggtacaacgtgactctgaccgaagggcgtaaccgcgaagttcgccgtctgtgggaagccgttggcgtacaggtcagccgcctgattcgcgtgcgttacggtgatatcaatctgcctaaaggtttaccgcgtggcggttggaccgagctggatttgaaagccaccaactacctgcgtgagctggttgaattggatgttgaaaccgttagcaagctgccggtggaaaaagatcgtcgccgtgtgaaagctaaccagattcgtcgggcggtaaaacgtcacactgaagtggcaggtcgtcagcagactgccggtcgtcaaggttcagcccgtaaaggctcaactcgtcagaacgcgggtaataccccctctgcgagcactccggtttcaggtcgccgcggcgcgcccgctaaacgcggatcaaaatagcggttaaccttattgccgcagtctctgtactgcggcaaattttcttcctcattcatctcttcaatattactgcctgattattcccattgcttttccaattatcatattcatacagaatcatatttataaaatgaatgtagtgttaccaatcgattccttgctgggccttaattccggcgtcaaaagcatgtttaaccggacgtaactcgcttacggtatccgccagttccagcaaatcgcgatgacagcctcgtccggtgatgatgaccgtttgatgagcagggcgatgattcaaagcttgaataacctcttccggcgttaaatagccgtagctgaccatataggtcagttcatccagcaccaccaaatccagcgaggcgtctgccagcatccgtaatccatgttgccaaacttcctgacaggcagcggtatcagtggctttattctgggtatcccaggtaaaaccggtggccataacctgaaattcgacgccgtgaggctctagcagattgcgttcgccattcggccattcgcctttaataaactgaataacacccgcacgcaggccgtggccaacggcgcgggtgacagtaccgaatgcggcggtggttttacctttgccattgccggtcatcacaatcaaaataccgcgcgtttcctgcgccgccgcgatgcgcgaatcgactttttctttcagccgctgttggcgctgttggtgacgatcgtcagacatagttgaatactttccttaaagcgactcgacggtcagattactcggcagcgccagctttgcgtcccggctgagcatcaaagctaatgccggttttgcggcggctatcatcgcccattaaatagagataaagcggcatgatttcagccggtgttttcaggttattcgggttctcttccgggaaggcagatgcgcgcattttggtgcgagtcccgcctggattgatgcaattaacccgtaagttagtagttttatactcttcggccaatacctgcatcatgccttcggtagcgaatttggaaaccgaataggctccccaaccggcgcgcccctgacggccaacgctagaactggtaaagacgagcgaaggagaagccgctttcagcaacaagggcagtaaagcctgagtaagcataaaggtcgcgttgacgttcacctgcatcacgtcttgccagatctgcacgtcttgttcggtcattggcaccacttcgcccagcaaaccggcgttgtgcaatacgccgtccaaataaggcacaacctcagcaactttctgcgcgagctgatggcaatcggcggaggtagcatgcagtaaatccagcgtcagaactctggcgggtaaaccgccggactgctcgatttgttgcttaacactttccaatttgctttcagtacggccaaccaaaatcaaacgcgcaccgtagcgagcgtaggttagcgcggcctcgcggccaatgccgtctccggcaccggttaccagaataattcggtgcgtcaaaaggtcatgtttaggttgataatgcataacaactcctctcactatcggcaggtttgcgcgatagcaggcagttaacaaagcaggataacggaagggaactcgatcgaacctaagctcaacctactgactatcttgcgcgaaaatggcgagcatcagaaaaagtcattactcctatatgcctgaaacaaaatgcattttcaatcagaaagaccctgaagatgtttttgtctgtaacaatttagaggtaatttcgtttcatttttccgctactgaataacattcattcttatatttaagagaaactaatgcaattcatcatttgcgcaagacggcgagtcaggtgttcgctagaatgcaaatactctctttcaacactgattaagaaaggcggaatgtgtggagttaatttcactgtatgggctgtttctagccaaggttatcactgttgttgtggctattggggcactggttctgctggtggtaagccttgggcaacgcaagcaaggtgcaaagggtgaattgaatctggtggatctcggcgaacagtatcgggaaacccagcgggaaatgcgtctagcgcgtatgtcatccgccgagcggaaaatctggagcaaagagtttaaaaaacagcaaaaagccgatctgaaactgaaaaaagaacgcgccaaggccggtgctattgccgcggtgaaaccttgcctgtatgtgctggatttcaaaggcagcatcgatgcgcatgaggtgacctctttgcgtgaagaaatttcggccgtgctggcggtggcgacgccgcaagacgaagtattgctgcggttagaaagccccggcggcgtggttcacggttacggtttggcgtcgtcccagttggaacgtttgcgccatgcaggcgtgcgtttgacggtggcggtcgataaagtggccgccagcggtggctacatgatggcctgtgtcgcggatcgcattatttccgcgccttttgccattattggctcgatcggcgttgttgcgcaaattcctaacttccatcgcttattgaaaaagaatgatattgatgtggaattgcataccgccggcgaatttaaacgcactctgacattatttggtgagaacaccgaacagggccgcgagaaattccgggaagacctgaacgaaactcacgagttgtttaagcagtttgtgcatcaacaacgaccttcactggatattgattcggtggcaaccggagaacattggttcggcattcaggcaaaggaaaaaggtctggttgatgccattggcaccagcgatgatttactgattgccgagatggaaaatcacgaagtgattggcgtgcgttattctcgtcgtaaacgtctgatggagcgttttaccggtagtgcggcagaaagcgtcgaccgcctgttattacgctggtggcagcgcggtgagaaaccactgctgtaagtcgattggctcactgctggcaatcagtgtcaggaataatgtcaggtaataaatagaagaaagcagggggctaatgccccctgttgttttatgacgcagggcaaaattgagatgccccaaagcggtggttaatcaaccaggtgatatttggacgacaacacgtgagccaaatgcttaaacatgttaaatacggcggtagttttcgccgtcggtaacccgtccttatccaggaagaattcgccgcgaaaaactaataccggccctttttgctctacttcagttgccaccatgccgtgcagataatcctcatgttgttggattatttcgttagcttcagtcagtaatgcctgacgttgaatcggggttgtttcaccgtacattatctttctccctctaaggtcatttctgtcgctattctactgcgggttagcgtttatccgcaaacaggctaaggtttatgcgagtgaacaaacgtttaaccttaagggattagctaaattaagattccgagttaattaggttgcgcagcggtttttatcaggtacagtgtgggattttatactactaggtggaaggttttgttgacgcaattgggctgaattaatgccctggcctctgggcgtagacaaaaatcttgagggcgtttgatacggattttaggatcgtcgggttgaggcggcgatcaaaaaacatgttgatctcctgcaaaagtaccgcaatataaaaaagagatgcagaatgccgcggtatggcgagataaaaaccttcttttagaagcaataatttaggtaaaggtaattatgggtaaagctctcgtaatagttgagtccccggcaaaagccaaaactattaataagtatttagggaatgactacgtggttaagtccagtgtcggtcacattcgtgatttgccgaccagtggttcagccagcaagaagagcgctaactcaaccgaagataaaaccaagacagaagacaaacccaaaaagaaagttaaaaaggacgaaaaggttgcgttggtaaaccgtatgggcgttgacccgtatcacggttggaaagcgcagtatgaaatcctgcccggcaaagagaaagtggttgccgagctaaaagctttagcggaaaacgccgaccacatctatctcgcaaccgaccttgaccgcgaaggagaggctattgcctggcatttgcgggaggtgattggcggtgacgataagcgttttagtcgcgtggtttttaacgaaattactaaaaatgctattcagcaagcgtttaaccaaccgggtgagttgaatatcaaccgggttaacgctcagcaggctcgccgctttatggatcgcgtggtgggctacatggtttctccactgctatggaagaaaattgctcgcggtttatccgctgggcgagtgcaatccgtagcggtacgtttggtggttgagcgcgaaaaggatattaaagcctttgttcctgaagaatactgggagctgcatgctgacctgttggccaaaggtgaaattccaattcaaatggaagtcacccatgcgcacaataaaccgttcaaaccggttaatcgcgaacaaactcatgcggcgctcaagctgcttgaaactgcgcgttataaagtactggatcgtgaagataaaccgaccagtagcaaaccgggtgcgcctttcattacgtctaccttgcagcaggcggccagtacccgtttgagctttggcgtgaagaaaaccatgatgatggcgcagcgtctgtatgaagcgggtcatatcacctatatgcgtaccgattcaaccaatttgagtcaggacgcgctgaccatggtgcgtggctatatcggcgagaatttcggcgaaaaatacctgccgtcagcggctaatcagtacagcagcaaagaaaactctcaagaggctcatgaagctatccgtccatcggatgtcaacgtgttggccgagcagttgaaagacatggaagcggatgcgcagaaactgtatcagctgatttggcgtcaatttgtcgcctgtcagatgacgccggcgaaatatgattccactacgctcacggtgcaggcgggtgattatcagttgcgtgccaaagggcgaaccctacgctttgacggttggaccaaagtcatgccggcgctgcgtaaaggcgatgaagatcgcaccttaccggtgattgaggtcggcagtgaactggatctgcaaaaactgattcctagccagcactttaccaaaccgccagcgcgttacagcgaagcttctttggttaaagaactggaaaaacgcggtattggccgtccttctacctacgcgtctatcatttctaccattcaggatcgtggatacgttcgagtggaaaaccgccgattctatgcggaaaaaatgggtgaaatcgtcaccgaccgtctggaagagaacttccgcgagctgatgaactatgatttcaccgcccgtatggaaagtggtctggatcaggtcgccaacgatcaggctgagtggaaagcggtactcgacgagttttttgccgaatttagcgaacaactggaaaccgcggaaaaagatcctgaagacggcgggatgcgcccgaatcagatggtgatgaccagcattgattgcccgacctgtggccgtcaaatggggattcgaaccgcgagcaccggcgtattcctcggttgttctggctatgccttaccgccgaaagaacgttgtaaaaccaccattaacctggtgccggaaacggaaatactgaacgttctcgaaggggatgatgcggaaactaacgccttgcgcgcccgtcgtcgctgccagatttgtggcaccgctatggacagctatctgatcgatactcaccgtaaactgcacgtgtgtggtaataacccggcttgcgaaggttatgagatcgaagaaggtgaattccgcattaagggttatgaaggcccaatcgttgagtgcgagaaatgtggctccgaaatgcacctgaaattagggcgttttggcaaatacatgggctgtactaacgacgagtgcaagaatacacgtaaaattttacgcagcggcgaagtggctccacctaaagaagatccggtgccgcttcctgaattaccgtgcgaaaaatccgatgcttactttgtattacgtgacggtgcggcgggcgtattcctggcggctaacactttccctaaatctcgcgaaacccgcgcgccgttagtggaagaattagtacgctttaaggaccgtttaccggagaaactgcgttatctggccgatgcgccggtaacggataaagaaggtaacaaaaccctggttcgcttcagtcgtaagaccaaacagcagtatgtttcgtcagagaaggaagggaaggccacgggttggacggcgttctatatcgacggcaagtgggttgaagccaaaaaataaggcagtttttgtggcgctgtgattgcagcgctatgcctgttaataaaaccagtctttgtggctggtttttttatgggctaagtaggagtagtgctttatagttttaacaatccgactattttcgaaatatgatcgacttattttttttgataatgatgagtatggcaagattgttggccattgtttttttattgttaagttctatacagcgctaagcaaaatgttatagtggttatattaaaacttttcttatcgttaaaagatattataaagtcgcttccagtactgttggcataatagcgttaatggttttttacttaataactatttggcttaccagggtgacaccgatataccaaactgtgagatgatcacagcgttcaacctaggatggtatagatatgaaattgcagcagctacgttacatcgttgaggtggtaaaccacaatctcaacgtctcctcgaccgctgaaggcttgtacacttcccagccgggaatcagtaagcaagtcagaatgttggaagatgaactgggtattcagatttttgcccgtagcggtaaacatttgacgcaggttacgccggctggtctggaaattatccgtattgcccgcgaagtattatcgaaggttgatgcgattaaagccgttgccggtgaacatacttaccctgataaaggctcactgtatgttgcgaccactcacactcaggctcgttacgctttacccaatgtgattaaaggttttattgaacgctatccgcgggtgtcactgcatatgcatcaaggctcgccgacccaaattgccgaggcagtatccaaaggcagcgccgattttgcgattgccaccgaagctctgcatctgtatgacgatttgattatgctgccgtgctaccactggaatcgcgcggtggtggtcaaaccggatcatccgttggcaggaaaagcgcacgtcactattgaagaattggcagcttaccctattgtgacctatacctttggtttcacggggcgctccgaactggataccgcttttaatcgcgccggactgacgccgcgaatcgtcttcaccgccaccgatgccgatgtgattaaaacctatgtacgccttggtttaggggttggggttatcgcaagcatggcggttgatccgattcaagatcctgatttggtcacggtagacgcccgcgatatctttacctatagcaccaccaagattggtttccgccgcagtactttcctgcgcagctacatgtatgattttattctacgttttgcaccgcacctgacccgtgatgtggtggataatgcggttgctttacgttcaaatgaagatattgaagccatgtttaaagatattaagctgccggtcaagtaagggcatcatctttattcttgagcgcgtgaatcgcatagtcgttaatcgcgtagccaccgtagaaaccgaatgctcaggccttcggtttttctttttttaaggtgaaaataaaacatccatttttactaaaaatagatattatgagtttcaaccggtcaaagattattgatataaatattatcggatattttaataattgtcgacaatcaataattaatgaaatgtttaatctgaaatgagcgttttataatagacgtaggcattatattacttattctcacctctataaattagaaagtatcttattggaggtaactatgaaaacaacgctgcaaaggccttctgttataaaatatgcaccacagtcatctgcgataaataaaaaacagactaacgatgtgcattggcgaaaaaacatgatgaagatttattccgatactatcactggggtaaaaaacatcagtggtatagaacaatgcggtattgctgaaagattggtgacgaaactaaaagaaaatggagtgatacctccagaacaagacgttatgttcaaaaagaattatttctatttgccactgtataatgaagtttcagtgcgtcaggttattgataaaaatagctcaagaatactatcaggcaaggaaccttaccctattgttttggccgacccgaaactgttttgcaatacggctttggccgcgttggctaaaaataaaagtaaagatatggacagcgagagtaatgaaaaacgatttcagaaactgggcggttgcttaactaaagagttgattaagattaattacaataaaaacccagacaaatttagatcgttggggcgttatctggcattgaaaaaaactcaatacattcgcctggacgaagtgaatccatcttctctggggaagctctatatcgccggatacggtaaaccggagggtgaaatctcaaaattgggtaaatatacgttagaaaactttaatttatcgacggccaatctggtgactaaagatctcctgccattattaaccgccgccgggctacctgttgatatcagaatgctacaaatggaaagtgccgaatccgcagacagcgaaaagcctttagctcaatatatgagtaacgcgctctctgatgctggcgtcccggccagagtgtttggttatagaggtacttctgtcctaaatgagttacatcatattcactcaacccgtgcggtgaaaaatcccatcgataataattttataaaatatgacctttatcgcgccagcgatgtacgccaagaatttttaccgcagaaaaaatcgaaaaaaatgtagataatcctattgtttactctgactatagagtgagtaaatttttgttttcgctgactgttaaatgattattctgctattttcagacattttttaaggcggcgattgataatgtggttggtaaaaaaccctattattatttgtgtatctaaaatggcgatggagtcaccgaagggtaatcaagaaaatttggtggttactcgcggtgtcaatatcactgattctacttaaaattagccggtttttctttcaacatcacattcgtggcaatcggttctgctgctaacacggtcaagccaataaaaaccaaatacgatatagactggccgatttttaatgatgagatgataaaaatgccttctcgatgaatagcatcagaatatggcaagggaaagaacgctacgggatattttcacctcatccaaccaccgtgtttaattaagatttatatcactgtcgtttaaaaaataattaaattcaattattgagataaaagagttccaccctgattcgaaaacgtcagtcgcggggtaatagatctcagtcataaacgtacgacttggaaagcgtctcggggcggtacggtagaaacaggcgttttcatttttatcagtgcgatcggtaattgtcctccatattttcctattgtcatactgaattatccttacgcaaaggatctgatttcccggtaaaaaacacctttaatcgattttacctatcgctatagacaaatgcgttgttatcagaatgttaacctatctttgtgttatatttaaatcaaaccctataaccgagcgggttattctccgccggactgcaccaatatcccaataaaaaccctctgtacagaacaacaaaggagccgctatgtcgttggatctacgaaaaacgagtatgaccacgctggtcgcgttaggtacggaatatcactattacagcttgccgaaagtggctccgctgttaggtgatattgaccggctacctaaatctatgaaagtcctgctggaaaatctattacgccacatcgatggcgatacggtacatgaagaggatctggcggccgtcgctgattggctgaaggatggacatgccgatcgcgaaattgcctatcggcccgcgcgcgtgctgatgcaagatttcactggtgtaccggccgtggtcgatttggccgcgatgcgggaagctgttcaccgtttgggcggcgatgtcaatcaggttaatccgctgtcaccggtcgatctggtgattgaccattcggttaccgttgatgaatttggcgataaagacgcctttggggaaaacgtccggctggaaatggaacgcaaccacgaacgttatatcttcctgcgttgggggcaaaaagcctttaatcgcttccgcgtggtgccgccgggcaccggtatttgtcaccaagtgaatttggaatacctggggcaaacggtgtggcaggaacagcagggcgataaacgggttgcctatccggataccttggtcggaaccgattctcacaccacgatgattaacggcctggggattctaggctggggcgtcggcgggattgaggcggaagcggcgatgttgggccaaccggtatccatgctgattcctgatgtggtggggttcaagctgacggggaaaattcgcgaaggcatcaccgccaccgatttagtgcttaccgtcacccaaatgttgcgaaaacacggggtggtggggaaatttgttgaattctacggcgacggactggccgatttacctttggctgatcgagccactatcgccaatatgtcgccggaatacggcgcaacctgcggtttcttcccggtcgatgaggtcacgctgagttatatgcgcttgagcgggcgcagcgatgcgcaaattgcactggtagaagcctatagcaaggcacaggggctttggcgtcatccgggggatgagccagtgtttaccagttcattatctttggatctcggtagcgtggaatccagtctggccgggccgaaacggccgcaggatcgcgtggcgttgccgaaagtccctcaggcgtttaacgcttttggcgagttggaaattgagggtaagaaagataaggttgagcagattgagttttcactgaacggggaaaatcatcagctggaaaatggcgctgtagtgattgcggccattacttcctgtaccaatacctcaaacccgagcgtactgatggcggcgggtttgctggctaagcgcgccgtagaaaaagggttgaaaaccaaaccttgggtaaaaacgtctttggcccctggttcgaaagtcgtgaccgagtatcttaattcagcgggattaacgccttatctggataatctgggctttaatctggtgggctacggttgtactacctgtattggcaactccgggccattaccggatccaattgaaaaagctatcaaaatcggtgatttaaccgtcggtgccgtgctgtcaggtaaccgtaacttcgagggacgcattcatccgctagtaaaaaccaactggctggcttcaccgccgttggtggtggcctatgcgttggcagggaatatgaagctggatctcacgaccgaatccttaggggaaggtcatgatggtaagcctgtgtatctgaaagatatctggccgagtggaaaggaaattgccaaagcggtggaagaagttaaaaccgaaatgttccgcaaggaatatgcggaagtctttagcggagacaagaactggcaggctattgtggtagaaagcactccgacctacgattggcaggctgattctacctatattcgccatcctcccttctttagtgatatgaaggcggaacctgaaccggtgcaggatatccagaatgcgcggattctagcgattttggcggactctgtcaccaccgaccatatttctcccgcaggcaatatcaaactagatagtccggctggccgctatttgcgggaccgcggtgtggaaatcaaggaatttaactcctacggttcgcgtcgaggaaaccacgaagtcatgatgcgcggcacttttgccaatattcgtatccgcaatgaaatggtaccgggagtggaagggggaatgacgcgacatattccttcaaacaatatcatggcgatttatgacgcggcgatgcaataccagcaggaaaaagtgacgctggcggtgatagccggtaaagaatacggttctggctccagccgcgattgggctgcgaaagggccgcgtttgttaggtattcgcgtggtgattgccgaatccttcgagcgtattcatcgttctaatctgattgggatgggcattttaccgttggaatttccgcagggcgtaacccgtaagactttagggttaagtggggatgaaaccatcagcgtgagtggaatgcagaatctgaaaccggggcaacaggtgccggtgacgctgacttacgccgatggtcgacaggaaatcgtcaatactcgctgtcgtattgataccggtaatgagctgatctacttccagaacgatggcattttacactatgtcattcgcaagatgctgtaatccgctagggtaggtaggtgacgttgtaacgaaaagggtggcaattaggccaccctttgtaggcgcacgtctaaggtgcagctctatgtgcagatgattatattgcgcgcaatacttatgatttgactaatatttatgtcgataataattgaaggataaaatgtagggataaaaacctatcggcggtaaaacctcgcctgcattatttgctgagcaaatgccccattttagccgctttggtcgccatataatgttcgtttttaggattacgacccactaaaagcggcacgcgttcaacgatgttaattccggcttcagtcagaatttcgaccttcttcgggttgttagtcaataagcgaatttctttgatatccaatagtttatagatgtcagcacacagggtgaaatcgcgttcatcggcggcaaaacccagctgatagttggcttccacggtatctgcacccaaatcctgtagcgcataagcgcggattttatttaacaagccaatattgcgaccttcctgacggtgataaatcagcactccacggccttcttccgcgatttgagccagcgcggcttccaactggaacccgcaatcgcagcgtaaactgaacagggcatcgccggtcagacattcggaatgaacccgggaaagcaccggtgtgttacctgaaatatcaccaaaaatcaatgccagatggtcgtgaccggttgccagttcttcaaaaccgaccatcaaaaaatcgccccacggagtaggcaatttggcttctgctacacgttttagctgcatgttagtgttcatattaatacatcaggctcttatacaattattgtagcgcatcctactttcagattcgcggtttaaccagtgaaacgctcgaattataactttcgctacacttgattatttatattgccataagttcaaattattagctgttcaacaaatgagcgatgaaagagagggtaacagataacttcgctatccaatcaattttacgtatattatcaatgaagtaaaaatggcctgcggctaagattaaggctgagtaaagaaaaggatatttgatgttaaacatcgcaaagcgaatcatgattgggactgttcttttattacttatgcccatagcggtctggatctccggttggcattggcagcccggcgcatccggattttggcttaaaggactttttgcgctaacggagactgtcaccgcaccttggggtatcgcgaccagcgttatcctgagcggttggtttttgtggtgtctgcgttttcgccttaaaccggcagtgggtctgctgatgatattaacgttggttattgttttcgggcagggcgtgaaatctctgattaaagaacaggtgcaggaaccgcgcccgttcgtggtctggctggaaaatcagaatcacttaaccagtgaagagttctaccagttgcctcgtaaagaacgcagcgcgatggtgaaagagcagcttcagaatcaaacgctggtaccaaaatggctggtcaaacactggcgctttgaaaccggatttgcttttccctccggacatacggtttttgcggcaacctgggcattgttgggcgttgggttgctttggccacgccgtcattacaaaaccgtcggattattaatggtatgggcgacgggcgtgatgggtagccgtctggtgctaggcatgcattggccgcaggatctgattgtcgcgaccttaattagtggtttgctggtggcactggccacgatgggggttcagcgttggatcggcccattgactattccgccgcaagagcaaaaagaaattgagcagcgagatcaacggttataatcaggggttatggaaatctgattgacggcgctattggcttttggttacagacgccccatatctttactttggcttataattgcgggcgtttctcattattttttaaatgaaagcggtaaaaagtcaaaatagcgttcaagatcgtgctttatcgcgcttcagggtttatttgcgcacagggtcagtgttaatttataacgtcatgtcgccacttttttggcataattcgtcgggtaatccggcctatgggaaagaacgtgaaatatttgctgatttttttgttagtactggttattttcgtgatatcagtcacgttaggggcgaataacgatcaggttgttacctttaactacttattggctcagggcgaataccgcgtatcaacgttattagcaacattgtttgccattgggttgatcttgggttggattatttgcggcctgttttatctacgtgtccgcatttctctgggacgagcagagcgcaaaatcaaacggcttgaactgcaactggaacaacctgctgaagatcgtcactctgcgactcagcctgctgtcagcaaggaataattctctatgttagaactgctgtttctgctgttgcccgtggctgccgcctatggctggtacatgggtcgcagaagcgctcagcaggataaacaacaggatgccaaccgcctgtctcgtgaatacgtggcaggggttaatttccttttatccaatcagcaggacaaagcggtcgatctctttctcgatatgttgaaagaggacagctccaccgttgaagcgcatcttactttaggtaaccttttccgttcgcgtggtgaagttgaccgcgccattcgtatccatcaggctttgatggaaagtgcatcactgacctttgaacaacgcctgctggccattcagcaattaggccgcgactatatggccgccgggctgtatgaccgcgccgaagacatgtttacccaactgattgaagaagctgactttcgcgttggagccttacagcaacttctggttatccatcaggccaccagcgattggatcaaagccattgaagtcgcagaaaaactggtgaagttgggcaaagataagcagcgtagcgaaattgcgcatttctattgcgaactgtcgttgcaagccatgggaagcgacgatctggataaggcgatggggttgctgaaaaaggctgccagcgccgataaagactgcgccagagtgtcaataatgcttgggcgcgttcatatggcgcgcggcgattttgccaaagccgcggaagctttacagcaagtgctggaacaggataaagaagtggtcagcgaggcgctaccgatgctgcacgattgctaccagcatttacagcaaccgcaggcgtggtctgatttcctgaagcgttgcgtagaagacaataccggcgccaccgctgagctgatgctggcagaaattctggaacagcaagacgggcgcgatgtggcacaggtatatattaaccgccagctacaacgccatccaaccatgcgggtattctatcgtttaatggattaccatttggctgatgcggaagaagggcgagccaaagaaagtttgctactgctgcgggatatggtgggcgagcagatcagaacaaaaccgcgctatcgctgccataaatgcggttttaccgcacattcgctctattggcactgtccatcttgccgcgcctgggcgtcggtcaaaccgattcgtgggctggatgggcaataatcgctgaagattgtttaccggcgatgggtggtgggcagcaaacagcagggtgagaacttttctcaccctaatcatgtcattttctatttcttcttttgcgccggtttaacgccatctttgagcaactgacgcagtttcttcaactctttctgactcagcggctgttcggaaatctcttcaattccctggttatcaatctcgctgtgatgcgttttcccgtcctttcggccagctttggcatttttggctgccggattaaaactctgctccagtcgttcacagacttcggagctgagcgaaaactgtttttccagcgcagcggctttaatcttttcttttaattccagagggattttaatggttaaggtcgatacttcgctcatcatgtcacctttaagcaggggaaagtaccaagctatgtgaggtttagcgcgctgtctagttgataacataaaattcacaaaaaattcatatgtcaaatgcaaaaaagagcgcatcggcgctcttcttgtcatagctacatgaaattacttatttcgtaatggggtgcgaaaccgctaattattgataaataacggcggtgccgtgcagcttattattgccgctggcagaggtgatctggaaagattttgcccctgcggcctgtgctttttgagccagcgcgttttccagttcggtcagagtaccggcgttgctgacagagattacgccagttttattcaaacttgctgactgttgggtgttcacgctggttgaagccatgctggtgaaagatgctagggaaagaactaaggcagaggcgatatatttgatgtttttcatgtgaaactccagtccattatgattaagtggaaggcgatgtcttccgatggactgaatgatatagcatctgaaattaatgaaaatctcaaactcctgataatctcattcaatttatttgattgataatttacctttcttgaaactgttttactttctaccggttattaactaccgaacaagactgacccaaattgacctttccgcaatgatttatacatttcgcacctctggcaccttgccgcagtcatggccgtggttatccctgtcatccttagagagataacagggacggaaatctgtaatttcccctcgacgccatgtagaatgccggcggttaatatttttgagtggctgttatagatagcacgccgttagtcgcgaaaggcagccttgattatttgcatatattacagagggtagaaacatgacgtcggatactaaaaccaataataatgactcaggatcttccccgattgtggtcgcattggactatgccgataaaaacgcagctctggcgtttgccgatcgtgttgacccgcgcgattgccggctaaaaatcggcaaagaaatgtttaccctgtttggcccaaagttggtacgtgatctgcatcagcgtgggttcgaggtttttctcgatctgaagtttcacgatattccaaatactaccgctaaagccttggctgccgctgcggaaatgggcgtctggatggtgaatgtccacgccagcggcggcgcgcgtatgatgacggcggcaaaagaagcattgttgccttatggcgcacaggctccgctgttgatagccgtgaccgtgctgaccagtatggaaaaagaagacttactcggcatcggtattgacgccgatccggccgatcacgccgagcgtctggctaaactgactaaaaactgtggcctggatggcgtggtctgttctgcgcaggaagcggtacgtttaaaacagagctgcggcagtgactttaagttggtgacaccgggtattcgtcccgtaggcagtgaggcaggggatcagcgccggattatgacgccacaccaggcgctggcggccggtgtagattatatggtgatcgggcgtccgattacgcaatcagaaaatccggcgcaaacgctgcgagatattcgggcatctttggtgaagggggcttaatggttaacgataataaccgattggtgtattcaacggaaaccgggcgcattgacgaacccgtggtcaaggctgagcgtccaaagggcgacggcatagtccgtatccaacgacaaaccagcgggcgtaaaggtaaaggcgtatgcctgattaccggcgttgatggcagtgatgaaatgctagagaaactggcggcggaattaaagaaaaaatgcggctgcggtggttcattaaaagatggcgttatcgaaattcagggtgataagcgggagctattgaagcagttattggaagctaaaggaatgaaggtcaagctggccggaggttgatatcaggataatacctgttaggggtcgactattttctgacatctctcatttattccgcccatcagtcttttatcatctgaaataatcgcttggtatgcagcaggactgatagcaacgttatttaagcaacaactttcgctgcggtttcaatcaccgccgcagcgaaagatatttcagtggatcaatcaataaggggaataaatagccttattatttacccacctgatgcccgataaccccaccaatagctgcaccacctaacgtacccagtgtgctgccagtcagtacggcaccgcccacggcgccggcaccggcacctatagcggtattacgatcgcgcttggacatattggagcaggcgctcagggataacgctaaagtaatagccagtgcggcggtagcaaatcgtttagtcataatcatcataaattctcctgacgttggcctggaatattgtccattaacacctgggctgccggacattatcccgctggagttacctcaataagtataggcagtactccaactttagctggtgggtcattttttaaagtagcggtatataaaacgttaatctgacttaaatgccagattaatgataatttgacggaaaataacccgtagaaaatagtataaatcactaataaacatttaataggtaaatagtcttaatttgacacctatcgacaggtaaaagcgaggaagtacgtaaaatcgcacgattaatcaataagaacgatagctcatgctctccaatcgatggtgacttcctgattgcccattatgtatgtaggcccaaggttatccgcatttgctgaaacctgaagtcaccgtttgttacgagcaatcctgattggttggcctttctgattaattatggacgggtttctctagccacagcagggtatccaccatattttccattttggcttctacttgtgcaatagcatcggcaataccttgattataataatgagcgccgagttcctgggtaaaaaaatccaataaaaattcggcgtcaaaatcgcctaatttgaactgatgttcgcgctccagatagcgctggattttttgcgccatgagacgggtctgttcacggttaaatacgatttccgccatcttaatctccactatttacgccgatgggatgagcctgtctgcgtattaaattgttgcacaaatgggcaaaagtcgcgctatgcggcgagaaatggcgcggcgtagtaatggcctgacgtatggcaattaatccagaatagcacagggattttgcctcgataaggctgtaaaactgaatgatacctgacagaggtcgtcatctggcggaaggtctggccgtcgggctgcgcaatacccgaatggaatcataagaaacatccattttggcccgctgccagctcggcggttaaacagctatgatagcgatcaccctataataccctcgattagtttatgattagtcatatgatcttggcactcacatttattgaatcaggagatccccatggagctttatctcgatacggcggacgtgactgcggtaaaacggttggcgcgtatcttgcctttacagggtgtgaccactaacccgagtattctggcgaaagagggaaaaccgatctgggaagtgctgcctgctctgcgagatgctctgggaggaaccggcaagctgtttgctcaggtgattgcccgtgatagcgagagaatggtggcggaggcgatgttattgtctcaacgcgtaccggggttggtagtgaaaattccggtgaccagcgaggggctggcggcaattaagaagttgaaaactatgtcgattccaaccttgggtactgccgtgtacggtgcaggtcagggattgctggcggtgctggcgggggcagagtatgtagcgccttatgtcaaccggttagatgcgcaaggtcaggatggcgtggccatggtgcgtgagttgcagcaactactgaatttacacgcgccgcaggccaaagtgctggcggccagtttccgcacgccgaggcaggttttggattgcctgctggcgggctgtcagtcggttactctgccggtagacgtcgccgaacagttgatctcaacgccggcggtacaggctgcggtcgagcagtttgaacacgactggcagggcgcatttgggtcgccgatgctgagttaactgtcctgtgaattagacactgcgctgattttggtttttcacccaataaaaacgcctcatcgttgcggatgaggcgttacgtcgtcacttgattctttgcctgtctaggcggaatatcaggctggaatctctgctaacacgggcatttccctaactttcccccctgactagggaaacgcgcatccagacaataacggtggaattcccgttcggtcatcggcattttttccggatgatgacgccgcatatgctgcagataattaccgtaatcctgcacgccaaccatcaaacgaaaactctgagcagttcgcttggcgatcagcctcatttttccccacagacttttcggctggggcatcaacggagctaaaggaacacagcgcaggatatgcagcccagatcgcgcagcggcagatttatgctggaaaattaaacttgaattaaccacgagcgacctcctcgcgtaatacaatttcgctctcatgagcggtgggttgactggatttcagcgcccgacgcaccacgaagaatgctgaaatcagcatagttaccgccactaacataaagaaagcgcagagggcggcgttaatctggttattaaacacgatagtttccatgtctttaaagcttttggccggagcaatcagtaccccttgttctacgccggttgagaatttctttgcctgcgccaggaaaccaatgctcggtttttcatggaaaatcttctgccaaccggcggtcatcgaggtaataaacaaccagatagtgggaacaatcgtcacccagacatagcgctgtttcttcattttgaacagcaccacggtgcccagaatcagcgccatcgacgccagcatctggttaccaatgccgaacagtggccaaagagtattaatcccgcccaatgggtcaaccaccccttggtagacgaaaaagccccagcaagcgacggcgacggaggttcccgccagattaccgaaccaggaacggttattggccagacttggtaccgctacgccgaccaaatcctgcaccataaagcgacaggcgcgggttcctgcatccactgcggttaaaataaacatagcttcaaacagtatggcaaagtgataccagaacgccatcatattgcggctattaaagacttcactaatgatatgagccatacccacggcgaaggtcggcgcgccaccggctcgcgacagaatggagttttcgcccacgtctttggcaatcatggttaacacttccggcgtcaccacaaatccccaactattgatcgccgccgaggcgctttccacggtagtcccgatcagcgctgccggtgagttcatggcgaagtaaacgccgggatcgatcaccgaggcgcaaatcaaagccatgatagcgacgaaagattccatcagcatcgcgccgtagccaataaagcgaatgtggctttcccgctctaccaatttaggcgtggtgccgctggaaaccagggcgtggaagccagagatagctccgcaggcaatggtgataaacaggaacgggaacaggctgccggagaacaccgggccactgccgtcaataaaccgggataccgcaggcatcttcatttccggcatagcgaagacaattccgatagccaaaccaatgatgacgccgattttcaggaaggtagacagataatcacgaggagccagtaacagccagaccggcagcactgaggcaacaaaaccgtagatcaccaatacccaggtcagggtagtgccgtgtaacgtgaagaacggtccccaataagggtgaagggcaatatttccaccgtaaataatggcggccatcatcagcacgaaaccgagcagggaaacctcagcaattttccccggacgcaggtagcgcatatacacgcccataaacagcgcgataggaatggtggcggcgatagtgaataacccccacgggctatctgccagcgctttgaccaccaccaacgctagggcggacaggataataatcatgacccccaatgcgccaagcatggtaatcaccccggcgaatgcccccagctcttgcttcgccatttcacccaacgagcgaccatctcggcgggttgaaataaacagaatcaggaagtcttgcactgccccggccatcatgacgccgaccaagatccagatagtgcccggcaaaaagcccatttgtgcggccagaattggcccgaccagcgggcctgcaccggcgatggcggcaaagtggtggccgaacagcacccatttgttggtcggaacgtagtccagaccgtcattgcgccgttcggcgggcgtcaggcggcgatcatccaactcaaagatattcttggcgataaacaggctgtagaaacggtaagcgatgctgtagcaggctaccgcggcgataactaaccagatagcatttacgtgttcgccgcggctgagtgccagcatggcaaaggcaaaagcaccgattaacgccacaatcagccagataacggcggtcttgacgtttttcatgaacaacaactcctttgttggtaggggcagagtgtgagggtgtaggtctatttgattaacgactcgttaacatatgatcttcaacgtggaagaaaagcccatagagcgaaatctgtgatgaacgaattattttaatgtcaatattgtttgcatttgctgacaaattgcgagctgacaggtttttttgactggggaagtcagtgggggaataggcaaaaagaataaaaaaaaaaccgcgggatagttggctatccacacggtttttaacgaacaacacctagtttcaggcggctgggcgggcgatcacattccgggtttccatacggacttccgcgatgacaacctcgattttatcgctctgacggtaaaccacttcaccgttgatttgtacggtgccggtttcctgactgcacaccatctcatcacgcaccgcgtgaataaatggcgcaggaataaaggcgaccgcgccgttatccagtaaacgaatgcgtaaaccaccgcgagtcacatcgataatttccgctgggaaacgggtatcggtacccgcgcttggctgtaaataacgggcgtacagccagtcacctacatcgcgctcggccatacggttcaggcggcggcgttcggccagttgaacggtaatctcttcctgcggtttttcggcctgttgaccggtaatcaccgctttcagcagccgatggttaaccatatcgccgtatttacgaattggcgatgtccaggtggcgtaagcctctaaacctaagccaaagtgcgggcctggctcgatgctgatttccgcaaaggtctggaaacgacgaatacggctatcgaggaactgggttggcaacgaatcaagatggcgacgcagttcgcagaagcccggtaacgtcagtagagcttgaggatcggcttccacttcgttggttttcagcactgccgctgcctgctcgactagggccgggtcaaaaccggtgtgaacgttatagattccaaagcccagacgctcgcgcagcacaatggcagcacagacgttggcggtaatcatgcattcttccacaatgcggttggcaatgcggcgttgctcaacgatgatatccagcacttcgcctttctcacccaacaggaagcggtagtctggacgatctttaaacaccagcgcattcttctgacgccaggcgttacgcgcgttacatacgcgttgcagcagcttgatttgctcagcgatttcggcgttctgcggctgccagtcaccttgattttccagccagtcagacacttcatcgtaaaccagcttggctttagactcgacccaggcgacagaaaatgaaatatcatcgcccagcgtaccgtcttcggcgatggtaacccgacaaaccagtaccggacggcgctcattcggacgcaaagaacacaggttatcggacagatctcgcggcagcatcgggatgttgaagcccggtaggtagttggtgaaagcacgtttacgcgcaatcagatccagctcgctgttttcgtccacgtaggaggtcggatcggcaatggcgatagtcagcaacagattgccgtcgcctttgtctgccacatgcagcgcatcgtccatatcttcggtgctggcgctgtcgatagtaacgaagttcagtgcagttaagtcttcacgctccaaaccgtcctgctttagttctgcggccaccatggttggcgcttcgcgctccagattatgacgggagagggtgacccaccacggaacgaaatgatcgtcggcatgagtgataaaggcggttaaatcagcgttgaaagcgcgatcgccttttagcggatggcggcgcatttcggctacggcccaatcaccgttttggaaatcgtgggttaactcgcgtaccggacgacaagggatagcatcccgcagcaaaggatggtctggaataatcgacaggcggtcatcttttctctgcactttaccgacaaagcgagagagaaaaggctcgaccagagactctggctcagcaatttcacgatctttttcggtatgaagagtggcgactatacggtcgccgtgcatgaccttcttcatatacggcggtgggataaagtaacttttctgcccatctacctcaagaaagccaaagcctttctcagtcccttttaccacgccttcaacgcgtggggtctgagtgtgaagttgctgtttaagctgcgccagcagcgggttatcttgaaacatatcgtccagtgaatggtgtagtgagtcgagtgattcgcggctgacagttttacgcgaatcagccgcgtcgggcaagcgtcatatcactctgatgcacaaatcccttaaataattcagggcataatgaatgccctgcataagagaaatatttctaactcaggcaatacgttgcgagcgtggctcttgccacggacgtatcaccaccggaatagatttggacgttggcgtatgggtttgatcgccaaaacttgatagcgggactaatggattggtttccggataataggccgccagattgccacggggaatgtcataactgaccagtttaaaaccgttaaccttacgggtaataccgtcattccacagcgtttcaatttctacctgattaccatccgccaaacctaaatccgccaaatcctgcgggttgataaacaggacttcccgctgcccataaacgccccgatagcgatcgtccaatccgtaaatggtggtgttgtattgatcgtgagaacgaagggtttgtagcacgaaaggcgcgttggtattgccaatctgcgggaacagactgtttggtaaaggcgcgtcgctgaactcggcttttccgctggcagtggcgaatttcaattcggcggcggtactgccgagatagaaaccgcccggctgctcgcaacgggcgttaaaatcgctaaaacccggcactgtggcggcgatatggtcgcgaatcaagtgataatcgtccgctaacgctagccagttcagtttatcgcagcccagcactgcatcggcgatggcacagacaatggcggtctccgaacgttggctatcggacagcggtttacccacgccttcagaagcgtgcaccatgctaaaggagtcctctacggtgatgtattgcgagccggtggcttgcatatctcgttcggtacgccccaacgtcggcagaattaaggcgtcggcaccggtcaccaaatggctgcgattcagcttggtgctgatatgcacggttaaatcacagcagcgcagcgcctgagcggtccgttgggtatccggtgcagcggcggccagattcccacccagggctatcaaaactttcacttcaccacgcagcatggcttccagcgcttccacggtattgtgaccggcttctctcggcggagtgaaatcaaagtgtgcggccagtcgatccaacatagcggcggacggtttttcgtcgatacccatggttcggttgccctgtacgttgctgtgaccacgtaccggacacaggcccgctcccggtttaccgagctgaccgaacagcaactgcatgttggtcatttcccgcaccgtggccacggagtgcttgtgctgagtaatgcccattgcccaagtgaaaataacccgttcggcatgctggtaaacccgtgcagcgtggcgcagctgctcttcgctcaagcctgattgttgggtgattttctgccaggaggtgcggtcgacggcggcaaagtaggcggaagagcctcgcgtatgcagatcgataaacgtctgatcgaaaatgccgtctaaccccatagagagctgctcgcgatgcgtttccagcagggctttcaccataccgcgcaccgccgccatatcaccgcctaaattcggctgataataggatgagctgatcggagaagacttcggcgtaagcagctcaatcgggttctgcgggtcggcaaaacgctccagaccgcgttcccgcagcgtattaaaactgacaatgcgcgcgccgcgatccttggcgtgacgcaggctgtgcaacattcgcggatgattggtgccgggattttggccaaagacaaaaatggcgtccgcccgttcaaaatcttccatacgaatggtgcctttacccacgccgatactttggcttagcccggtgccgctggcttcatggcacatattcgaacaatcaggaaaattattcgtacccagcattcggccaaacagttggtataaataggacgcttcgttactggcgcgaccggaggtatacaactctaactgattcggattattcatcgcgccgatgtgatgggcaatcaaccccaacgcttcttcccagcttaccgggcgatagcggtcgctgctggcatcgtagcgcattgggtgggtaatacggccttggtattccagaaagtaatcgctttgctggctaagcgttgtcacggtatgcgtggcgaagaattctggatcgacggctttgcgcgtagcctcccaactgacggctttggcaccgttctcgcaaaaactgaaggtgctgtgattatcatcaccccaggcacagccgggacagtcaaaacctttgacctgattgacccgcagcagattacggatattggcaagcgcacgtttgctgtccagcacaaaacgggtcgtagcttccagggaaccccaaccaccggctgcggcagtataaggtttgatcgatggtttgaatttcatgattaatggccgcagatgttgtttcgaataagtaaattattatttaaatacttgagaataatttgtcacaagtctagtgcggcggcgggagggcgtctaatcgaatgccgcaatcgcggcatagaggatatttatcgcggtaaaatagcgttgatttgggatgaggctaggctgtgaagcgcggctttgcgggatagcagggcgaacatcatcagttttccgggtaaaccttatctttaaattcgcataaatcttcaataatgcaggaaccacagcgaggtttacgggcaatacaggtgtatctgccgtgtaaaatcaaccagtggtgacagtcctgcttgaactcggcgggcacgactttcagcaacttttcttcaacctgatcgacattcttaccaggggcaaagtgggtgcggttacagacccggaaaatatgggtatcgacggcgatagtcggccaaccaaaagcggtgttcagtaccacgttggccgttttgcgtcccacccccggcagtgcttccagtgccgcccgatcctccggtacttccccctgatgtttttccagcagaatgcagcaggttttaatcacattttccgctttggtattaaacagcccaatggttttgatataggacttcaaaccgtccacgcccaaatccagtatggcctgcggcgtattcgccaccggatacagcttggcggtagctttattgacgctgacatcagttgcctgtgccgatagcagcaccgcaatgagtagctcaaacgggctggtaaacatcaattcggtggttgggtgcggattgttctcgcgcaggcgagtcaaaatctcgatgcgtttctgtttattcatcaggctttctcaaccattcctttgggcaccgcctcagcggcgactcgccgggctttacgggctttcattttttcatcaatcacatattttactgccagtaataatccgaggccgataaaagcgccgggcggcagcatggccagaagaaacggactatccagatgcacgatttgaacccgcagcaccttagcccagttgcccagcagcagatctgcgccgtcgaatagggtgccgttgcccagaatttcccgcagcgaaccgagaacaaacagagcgccggttgcgcctaaccccattgccagcccgtccagcgccgagagcccgattggatttttggcagcataagcttcggcgcggccaatcacgatacagttggtcacgataagcggaataaagatccctaaagactgatataaaccaaaggcataagcattaatcagcatttgaaccgtgctcactaccgaggcgataatcatcacgtaaatagggatgcgaatctcgtttggcacccaacggcgtagggctgaaacggccgtattggtacagaccagcaccaacgtcgtcgccagccccagcccaagggcgttagtcgcggtggaggagaccgccagcaaagggcacagccccagcaattgcaccagcgcagagttattcttccacaacccttgcaccatcaaattcttagcttcactcattgttcaactccgcaagttggcagggtagacagcctggctggcagggtttccataaacagcgcggtatttttaacggcgcgaactaccgcccttggggtgatggtggcaccggtaaattgatcgaaagtaccgccgtctttaatgactgcccagcgcttatcgtctttgccttcaacctgttgattactgaaacgggtaatccagtcagaaatgcgaatatcaattttatctcccaacccaggcgtttcgtgatgttccatcacccggctgccgaggactttaccttgaaaatctgcgccaaccaacagctgaatagcaccggaatagccatctggcgcggtactctctatggcggcggcaacgggcttgccgtctttacgcgccagatacaggcgatgtggcgcggtgttgcctaatgccggatcagtgacaacgtaacactcaccctgcatatcgttatcgtataactctgcgggaaccacttgatctaacaatgccttctgctgcaaggctgcctgatgagcaatggtattttgtgtcaggctgttcactacggcggtcaggccggtggccagcgcggcaaagacggccagcgtcacgccgtgacgtttcatggtagctagcatggcactctccttacttgtggccgtaaacgcgtggctgggtgtaatgatcgatcaacggcacggtgatattcgccagtagcacggcaaaggcgacgccgtccggatagccgccgtaaacgcgaattaaccagaccagcaacccgatcagtgcgccaaaaatcaggcgaccacgcggtgtcgtggaggcgctaaccggatcggtcgcaataaagaaggcccccagcatggtcgcgccagagaacaaatgcagcaatggtgaaccgaagctttccggtgccagcagccagcttaatccggcgcagacgctcaaagacagcagaaaactgaacggaatatgccagtgaatgacttttcgccacagtaagaacaggccgccggctaaaaagccaaggttaatccactgccagcctaaaccggccagaacgccgccaaatagcggttgctgtagaatttctctcgccggcaggctgcgcagcgaggttttgaagctgtccaacggcgtcgcctggctgacgccatcatagcctagctgtaaatcacgaatgctcgcgccttgagaggtgtggccggtaaaaatggtcaacagactgtcgtaaaaaccaatgctattggcttgcaggctgatcgggggcatccagctggtcatttgcaccgggaaagagatcagcaacaccacataacccaccatcgccggattgaaaggattttgccctaaaccgccatacaattgcttggcaatgacgatcgcaaaaaaggtgcccaacacgatcatccaccacggagccagcggcggcaggctaattcccagtagcaaaccggtaagtagcgcagaattgtcggccagccgcgttttaatcggctgtttacgtaaagccagcactgcactttcggtcagcactgcggttatcatggccagcaccatctgaatcaggctaccaaaaccgaagaaataggtctgagcggcgatgccgggaagacaggccagcatcaccagcaacataatgctgcgggtgctgcgctgattatgagtgaaaggggaactggctatttgtaaccctttggtgagggtgtgttgcactggcctgaatttcatgaagttacaaccataggttcgtataggtaatcaaggttcttaacgttgttgtgcgccgccgggcggggtacttgccggggaaacacacttggccattagggatatattgggctggcgcattctaccctaatcacggcaagggtaatacgtcttaattataagggtattatcccgataaaggagaaatgattaaacgatgctaatcggaaggtgattattcgcagtgtacatttctcttgcatttctgcactaattagtgacaacgcattcggtaaaaatgcacttttatttatgtggctaccggtttgttacttaaaagtaatgaaagtcgcatcaaaaaagcaaggcttgtatattaatgtaaattaactaacaccatgtatttatacgtattatttgttgattttagccttggctaaaaaaccattggtttcaggtcagattaatgtagtatgcagtgtaattatatatttgaagatctcagtaatgatgaacgaagacgtattgtttattgaagaacttattgaatggatcgaaattaatttagagaaaagaccgacgttggatgatgttgccaaaatctcgggttattcaaaatggcacctacaacggaagtttaaaagtattgtcggcctgcaactggcgtcttatatccgtggtcgggttttgactcgcgcggcggtggcgctgcgtatttctcgccgtcctatcatcgaaatttccgatgcgttgggctttgactcgcagcaaacttttacccgtacgtttaagaaacgttttggcaccacgcccaaccatttccgtctacaggataaatggaacgtagagggcatgatcccgcgctttagtttctatgagaactatacgccggagattaaacctctgacgctggaagccaaagagctggtcggtattactcgccgtctgaactttgatgaacgtaatctatgcagcggacagcatgcgtcctgcatggcaatgaaggatgagattctgctcgatttctttaaggagatgaatttcaccagccagcggatttatgcggttttctcagtcgatcctgacgagcgagatcaaagcagcttctattactcaacggcggtagataaagatcagcgccatgagttgcatggtaatagcgaaaccaacagtttcactatcccagggggggaatttctgtctatttctcatcagggtagtgcgaaggaatgcgtgaagttttcttcttatttgttcaatgaggttttgccgaagattcgagaggaagtgaagggcagcattgagatggaagtgattgaagtagagcactgtcattcggaagcgaaaatgcgtgatatcgacgtggtatatcagtatttgatttccgtagattaatccagttttcactccccgcatctgatcgttcggccatccaagtaacgggatggccgatgacgctgattttacgaagatattgctgatttttctgcggcttttttggctttgactctggcaatggctgccgccaccgccgctttacgcggatcgtccgtcgggttattcacggcttcgctgacgacgggagtggcgctgtcatcttgttgattttgcgcggcttttttggctttgactctggcaatggctgccgccaccgccgctttacgcggatcgtccgtcgggttattcacggcttcgctggcgacgggagtggtgatggcatcttgttgattttgcgcagcttttttggctttgactctggcaatggctgccgccaccgccgctttacgcggatcgtccgtcgggttatccacggcttcgctggcgacgggagtggcgctggcatcttgttgattttgcgcggcttttttggctttgactctggcaatggctgccgccaccgccgctttacgcggatcgtccgtcgggttattcacggcttcgctggcgacgggagtggtgatggcatcttgttgattttgcgcggcttttttggctttgactctggcaatggctgccgccaccgccgctttacgcggatcgtccgtcgggttattcacggcttcgctgacgacgggagtggcgctgtcatcttgttgattttgagcggcttttttggctttgactctggcaatggctgccgccaccgccgcctgacgatcgtcggttgattctggtgtagacgttgtcgcttcgcgtttttctgcctgacgtgctcgagcctgtgcttttctggcttctcgagcggcgatgatggcactgttatctggcatttcacctggttgtacgttaatcgctgtgtcggaagatttctgcgccgcaattcgctccatcgcagcctgtactgcctgttgatcgctatcggtcaatttgaccgctgcttgtttatgtcgttgttctctagcctgtttttcccgttccagacgagcctgtttggcctcaaaacgcgccttggcttcggccgctcgcgcagcctcctgatccagcgctttaatttcggctttttcttttctgtaatactgcactaacggaatattactcgggcaaacataggcacaggcaccacactcaatacaatcaaacagattatgattgcgggctttttcatgctcttcgccgcggctgaaccagtaaagctgctgtggcaacagccccgccgggcaggcatcgacacacagcccgcagcgaatacaggcttcttcctgctcgctgataccgatctcggtttcagcgggagccagaatacagttactgattttgactatcggcacatccagacttggcagcgtaaagcccatcagtgggccgcccataatcaccattggctgcgcttgcggagtaaagccagccagcgccagcagatggagcaccggcgtaccgatcctggcccagaaattgccgggacgagaaagggcgtcgccggtcagagtcacgacacgctcaatcagcggttcgccgtcgataatagctcttttgatcgcgacgacggttccaacgttttgcatcaatacaccgatggctgaggaatgcttaccgaaaggcacttcctgaccggtcagaattttagtgagctgtttggctccgccggaaggatatttggtcggtatgacgcgtaacagaatcgacgaatggccggccaacgactgcttcagggcttcaatggcttccggtttattgtcttcgatgccaatcaacacccgctcaggttgtagcaagtgaattaagatattgattccgctgaccacttcgtcggcatgatcctgcatcagtcgatcatcggcggtaatataaggttcacattcggcggcgttaatgattaaggttttaacgccgtttaaaccaccctgtaatttgcttgccgtagggaatcccgcgccgcccagcccggcaataccggcctgatgaatacgttccaacaaatcgtggggctgagcctgctgataatcgggtaggggatggcgttcacaccagcggtcttctccatccggtgtaatatgtacacaaatctcggctaaaccagatggatgcgcagtcgtgtgtggcgcaattgcagtgatcaaaccggatgtcggcgcatgaaccgggacggtgcgtccgcgcccaacggtcagcggctgacctttcaacacgttatcgcccgcttttactcgtagttcgccttccggccctaaatgctgctggagcgggataataaattgatcgggaagcggcgcaatacgcatgggtacgcggctggattgcactttcatttccggtggatgaatgccgccatcaaagtcccagattttatctttcttacgcggtgtaaatagcttaaacatgttgctccacgtcgatcaatttcactggaataatctgtgatgggacggttttcaccggaatagcgttgagatcccacttccagttggcggtcgtggtaggaaccggaatcatttcaatacaatcggttgggcaaggatcaacgcataaatcacaaccggtacagagatccggcaatactgtatgcatggcgcgggttgcgcccacaatggcatcgaccgggcaggcctgaatacacttggtgcagccaatacagttgctttcatcaataaatgccactttccgcaccggattggccagcgtttcgtcgccgtccaacggttgcggttctacgcccagtaaatcagccagtttaagcataacctgctcgccgccgggggcacatttattgattttttcgccgctgttggagaccgcttcagcataaggacgacagccgggatagccacattggccacactggctttgtggcagaagctcgtcgacctgctcaacgatgggatcttcgtctacctgaaaccggcgcgcggcaaagcctagcaccacaccggaaattagcgctagcatgctgagtgcgccaatagcaatccataacgacatcattagaatttcaccagccccgtaaagcccataaaagctaatgacatcagcccggccgtaatcaatgcaatggaggaaccacggaatggcgcgggaacatcggcgaccgccagacgctcgcggatagccgcgaagagaaccatcaccaaagagaagcccgccgcggcgctaaaaccgtaaacggctgattgaaggaaattatgtgactggttcacgttcagcagggccacgcccaataccgcgcagttggttgtaatcaatggcaaaaatatccccagcagacgatatagcgccggactggttttgcgtaccactaactcggtgaattgcaccactacggcaataaccagaatgaatgccagcgttcgtaaataaactagccccaaaggcagcaaaataaagctgttcaccatccacgcgcataccgacgccagcgtcagtacaaaagtggttgccagccccatgccgatagcggtttccagttttttggaaacgcccataaacggacacaggccaagaaatttgaccagcacaaagttatttaccagaacggtgctaacgaacaaaagcaggtattcagtcattgcggaacctaaaaaaataaaagccgcctattatccgaaattggcggcctgacgacaacagatgaaatgcagggttattgcatttttccctcgattttatggggaattagtgcgttgcggccttaaatctccgtaaaagtcccttttacccgaacagatttttgcatatagggtacaaagcaagctgctgccaacagaggccagccgagggctctcagggcaacttcatcggaaattggtgcgaaggcgaaggctttcagtgccagaagaaccgtcagcaacagccacaaaataaacagtttagggaaacggcgggaacggctgcaaaacagccatagcatccacagcgtgaagccccacataaacagcgttgtcaccacagaaaagtaccattgaagggtaaatgcctgtgagttggccataaggtattcccgcgactctggtgtgaccaccgccatagcatacagtgccaacatcaacgtagcgctgagcaaggtgacaatcagataggccattggtgccagtaaccaaccgccgattcgctgatattcttcagagtgagacatgacaaaaccttattcttcattacgcattaatggccggataaccggccaacagatcgttagcttaacccgtagatatgcccttcgtcatctatatcaatatgatggtaggcaggcaaactacctagccccggcatggtcatgatattcccagcgtaaacccgaacaaaaccggctccggcggatacggcgcaagaagtaatcggtagcgtgaagtcacggggaacgttctttttcgcggggtctgcactgattgataacggcgttttagcaacgcacagcggcaagtgaccaaagccctgctcggtaatatccgccagttgctggcgcgccagcgggctgagcagtacctctttggctccataacgttcggctaaacggttcagtttggcttccaatgacatgtcgttcgaataaggcaatttcggtgtattagggttgtcgcaggctgccagtacgcagcgtgccagttgctcagtgcctgcaccgccggtggcaaaggcatggctaagttcgcaggcctgcgctccggcagataaggcgaaatcttgcaggaaggcaagctcctcctcgctatcggtcgggaaatggtttatggcgacgaccacaggtaaaccgtagctggcggcattatcaatatgccatttcaggttagcgcaacccttggcgagcagaggaatattgctgtcagcaatttctgctggcaaagactggcccggtttaatgtcaaaatcgccgctgttagctttgaggctgcgtaacgtagccaccagaaccacgcaggaaggagcgatgccagattggcgatatttgatattgaagaatttctccatccccatatctgagccaaaaccggcctcggtgacgacacaatctgccagttgcaggcctaaacgatcggcgagtacggatgagttaccgtgcgcgatattggcgaaggggcccgcgtgaatcaacaccggcgtttgctcgctggtttgcattaacgttgggtgaatactgtctttcatcaacgcagtcatggcacccgctacgcctaaatcatcggcggtaataggttgaccgctggtggaataagccagaataattcggccgatacgacggcgcatatcctgcaatccctccgccagcgcgagaatagccataagctccgaagcggctgttatttctacgcggtcggctcgttccacgccgtggctgccacctcccacccctacggtaatctggcgcagagcacgatcgttatgatccagtacccttggccatagaatgcgatgtggatcgatactcagccgttccatgccggtctgcgggccgaaatcctcaccgagacgttgttcgtggtaaaggcgagcgtccagtgcggcggcggccagattatgggctgaactgatggcgtggatatcgccggtcagatgaaggttgagcttttccatcggtaaaacttgcgacgcgccaccgccggcggcaccgcccttaacgccaaacaccgggccaagactcggttgacgaatacaggcgacacaccgcacgccgagtcggttgatgccttggctgagcccgatggttgtgacggttttaccttcgcctaatggggtaggtgtaatgctggaaaccaggaccaatttgccctgcggcttgtcggcatcaatacaatcgatatcaattttagccatgtgcttcccatagggaatcaaagcttcatcggctaccccaaggctgcgggcgacggcctcaataggcagcaaagcaggggcaacgggcttgttttcaatcgtcgataatttttgtgtcatggcgataggtgttcctgttatttggcggcagagcaactggctgaacataacccgtgaattatgtcatagaccggagaggaagcttggcagcaaatcaacaaaatgcgaatcaacgcgaaaaataaaaagaaactgatgtaaataaaccggggatattgcagaggacttgttttgaacatattttaaccatcagtgccgagggcgatttgttgataataatcctcaaataaaaatattaaaaaataatgtattaatagctgttaactttcattattaatgcttaataaagttttaatactattaaagaaatgaagtagatagagatagagaacaagaaaaaataaccaaaatctgtccatatcgattgtgattcccctgcctttaccctgaagcggatcgagtttatggcattaaatttatatgatgtgtttttattttaattcattaaaaacaatatgataaagaaatgggtttatgataaacccttaaagttgtatattaaatgcatgtttaaggatatgatgatgcctcgaacgatagccgatggaacattgatcaccgttagattcaaacgatgagcgaaggaacggcaatacattctaaatgatttagaacgaggtaatgatgacgcaaatatcaatgtcagatatgaaagataaagggcgtttaatcacagactggcggccggaagatgctattttctggaaactacgtggtcaatttgtagcaagacggaatctctggatttctattttctgtctgctattagcttattgtgtctggatgttatttagcgcattggcagttaatttaaatcacgtcggattttcattttcggcagaccaactgtttatgctggccgcattaccttcggtatctggcacgttattgcgggtagcttattcctttatggtgccaatttttggtggtagacgctggaccgcggtgagcacggggtttttgattatcccctgcgtgtggctaggttttgcggtgcagaaccccaagaccacctttgaaaccttcgtcattatcgctctactatgcgggtttgccggagccaattttgcttccagcatgggaaatatcagcttcttttacccgaaagataaacaagggcaggcgcttggttataacggcggtttgggcaatattggcgtaagcctgatgcaattggtggtacccattgctatttcggtttcgttgtttagcgcctttggcagcgcagggaaactgatgcccgatggggaaacgctgtggctggagaatgcggcgtggatctgggtcattccccttggcatcgccacgctactggcctggtttggcatgaacgatctggcgatgaacaaaacttccgtcggcaaacagttcggcattttgaagaaccgccatttatgggttctgggattattgtatctggcgtcttatggctcattcatcggttttgccgctgcttttgccatgctatccaccattgaattccctgaggtcgagatactctattacgccttctttggcccgtttctcggtgcattagcgcgctccgtgggcggaatcatggcggatcgttttagtggcgtattggtcaccgcgctcaattttgttgtgatggcgctactgatcctgttgttgattatgacattaccggatgctaatagtcctggctcgtttgttgcttttttcagcgtctttatgctgctgtttatcactgcagggctgggcagcggttcaacctatcaaatgatcgcggtggtctttcgtaaaagtactgccgacaaaataaaagcgcagggcggcagtcaggaagaagcggagcgtcacggcgtggctgataccgccaccgctctgggctttatttccgtgattggtgcatcgggtggcttctttattccgaaagtcatgggctcgtcattggcaatgaccggctcggtctttacagcaatgttgtttatttttgtgctttatattttatccatcacgatgacttggctggtttatggcagaagaaaagggtgttaacgtccgccataacgccagagaaaagttgttcagtgtttacaaagagggttatatgcaggaactcatttgctacaaaaaaatgccggtttggaacagtcgcacgttgcctgcgatgttccaggaaaaacacaataccaaagacggtacctgggccaagctgacgatattgcaaggcgagctgactttttcattgctcacggaagacggggaagacattgagtccttcatttttagcaaggttaaccagccgaaaatgatcgagccgcaggtatggcaccggattgcgtctttctctgatgatatagaatgccagctagagtttctctgcacgccagaagatttctatcataaaaaatacgctttgacgccgactcattcggaggttatcaacgctgcccgtctgataacaccttgtaaagcgatggatttgggctgtggttccggccgtaattcactgtatctcaatctgctcggttttgatgtggatgcctgcgatcacaacgctcagtcggtggaatttattgatgaaattattgaaaaggaagggctgcaaaacatccatacgcaggtacgtgatattaacgatctggtgatcgacggtcagtacggtttaattttatctaccgtggtgtttatgtttctcgaccgtcagaagataccggcgattatcgacaatatgcaacaatcgactcagcctggcggttataacctgatcgtggccgcgatgtctacggatgattacccgtgcaatatgcctttttccttcacctttaaacacaatgagttgaaagaatattatcgggattggactatcgtgaaatacaacgaggaccttggggctttgcataagaaagatgcagaaggcaacagaatcaaactgcgctttgccactttattagccaagaaaggttagcaaaaaatgtttgcgaagaaagattagctaaacatgtttacgaaaaagtgagttaagaataatagttagccaaacatagttagccaaggcaaacgagtgtgcgaatcaatatccggtcgagcgaatcaagggggataggctaaaaacgcaatgtcattatggataaatagcatgatgaataaacgcaatgacgctctcaaagtcgctgtgccgtatattgagcgtttgcgatagctatagccttaaaggaataaggcgcaataaaaacgctctggccactacggagcagagcgttttttcatcgtcatgatgttatttgcgattacggttttaaagcgattaacctcagcgaggtgggcaaccgatatttagcgttgatcgccgttgctttcaatcactttttgataccagaagaagctttttttacgttgacgcgcgagctgcttttggtgatcaacgtagacaaagccatactgcttctggaatccattaagccagctgagcaaatcgataaatgaccaagggtagtatccgcgtacatccgccccttgcttgattgcatcttcaatagcaccgatatgctggttgagataatcaatacgatcgtcgtccaccacttcgccatcgataataggatctttagcgcctaagccattttcggtgatgtagatcggaatatcaccataacgggctttgatattcatgatgccttcggtcagaccttgagggtagatttcccaatcccagtcggtgtaaacgccgtttggattacggacaaacttgaacagtcctttgaaaccgaattcattaccctgctggtggcctgcgcctttttgcccggttgtattaatctttagctgagtatcctgattattggcggcgatagtctcgcgcttatagtaattcaagccaataaagtcgcagatattgctgcgtaacagtgcgtcatcccctggtgcaaacctcggaactccccagatagcctgagcttgctccagcaactcggcaggatattcgcctttcagcacaggatcgtatagccagtgggtgaaaatgccttcagccagattgaaagccgccatatcttccgcagagtggctcagcggtgtatgggtttgcagcacgttcacaaaaccaatcttcccgtcgataccgcaggaacggaaagccgctactgctttagcgtgagccacaaatacgtggtgacaggcttgaatggcgcgcgcaggttcctgaacgcccggtgggtgcgcgccagtaatatatccgaaaccaatgaaacacacagtttcattgaatgttgaccagagtttgacccgatcaccgtatgactcatagcaaaggcgagcatattcttcgaaagcatcggcagtactgcgagcttcccagccgccttcatcctgtaatgcttgaggtaaatcccagtgatacagggtaatcattggctcaatgttgtgttccaacaaagcatcgatcaaatcgctatagaattttacgccggctggattgacttccccacggcccgtaggtaacaggcgaggccaggaaatagagaaacggtaacttttcattcccatttcggccatcaacgcgacgtcttcacggaagcgatggtagtgatctacggccacatcgccgttcgttccctgataggtcgtacccggtaaatgggagaaggtatcccagatggaaaggcccttgccgtcggcgtcgtaagccccttcaacctgataggcggcgctggcggcgccccagaggaaatcttttggaaaagcagacataaaacattcgctccacgtaaattgaaaatgggatcgtccaatttgttaagtttagtgtaagcggaatagatttattcctgcaaccggtttctgaaaccggttgcaggaaaatgaatgtcactttgcgcaacatcaattttaatcggtatgaagagaatttcagaagaaaacagaaaaattcagcatgtgtgggagcgatttatcaccttgtcagatgggtaacaaccgactttaaacataccagacaatccagtatgagaacctgatgctagtaagcgtttttgcgggaagaacgcataagattctgaataaatgagggggaggttaacgcgggttgagtgggatgaatcactgattattgacatctagatagctgattgagaagggcttcgcgtcaatgatttcccggtagagaggagcaatgttatatcaccgccgcaatattgaacctcatgatctttatctatcgcatcgtctatcgcgaggacggtatcacctggagaatagcgatcacatcgtgcggatttagcctgattgtccgggtggaaagggaattagctcttgttcagagtgacatcatggtgtcaaatcgatccagatttaaaatagaaaaagctaatggcgagaggataaacgatggctgaaaatattagagttgggttgctgggctacggttatgccagtaaaacctttcacgcgccgctgatttcggggactcccggcgtagaatttgcggccgtctccagcagcgatgccagtaaagtgcacgccgactggccgtcggttaccgtggtgaacgatgctcaacatttatttgacgatccgagcatcgatgtcattgttattcctactcccaatgatacccactttccattggcgcaacgggcgctggccgcaggcaagcatgtggtcgtggataagccgtttaccgtgacgctgtcacaagctaacgagctaaaacgcctggcagatgaggccggtttgctattgtcggtttttcacaatcgtcgttgggacagtgattttctgacgctgaaaaccttgctgaaggaaggtgcgttaggagatgtcgtgtatttcgaatctcatttcgatcggttccgtccggaaattcgtcagcgctggcgggaacaacccggagccggcagcggtatctggtatgacttagggccacatttgctggatcaggcgttgcagctgtttggactgccggaaacccttaatgtcgatcttggtttgctgcgtcccggcgcacagtcggtggactatttccacgcggtattaagctatcctggccaacgtgttgtgttacatggcacggtgctggcggcggcagaaacggcgcgttatatcgttcacggcactaaaggcagctatattaaatacggtctggatccgcaggaagatcgcctgaaagccggtgaacgcctacctcaaaccgattggggctatgacatgcgtgacggagtcgtgacattgtcacaaaatggcgtattggtggaacagcctttgctgacgcagccgggtaattatccagcttattatgctggcattcgcgatgccattttgggtgtaggcgagaatcccgtccctgcaaccgaggcgattaccgtaatggaattgatcgaactggggctggaatcaaataaacataagcaagcgttgccggttaatccccgttagcactaaccattaatacaggctatgagtaatagctttcctgcacttttgataattacgtctatcgtttaggtctattattgatggtttcctctgattgatattttttattaatcggaggcattttgattgaaggaatacagtggcatgtcttggttgcaacgcttacgtattgatacgtttttactggtattaattggggtggtgatcatcgcctcttttttcccctgtgaaggggaaaccaaagtgtggtttgaacgattgaccaccgcggccattgcgctgctgttttttatgcacggagctaaattatcccgcgcggcaatagtggccggcatggggcactggaagctgcatctggtggtattcctcagcacttttgcgctatttccgctgttagggctgggaatgaacgtgttggtgccgggaattctaacgccaacgctgtatttgggattcctgtatcctgtgcgccttgcctgccacggtacaatcggcgattgcttatacctcggttgcaggtggaaacgtggcggcggcgatttgtagcgcctcggcgtccagtattctcggcgttttcttgtcaccgttgctggtgggcgcgctgatgcaaactcagggcggcagtacagataccttgcacgccattggttctatcatcatgcaattgatggtgccgtttatcgtcggccatttgtcccgcccactgatcgccaaatgggtcgagcgccataaaaaactggtcaatataactgaccggtcatcgattctgctggtggtttatgtggctttcagcgaagcggtggtggaaggtatctggcatcaaatcgacggctggtcgctgctggcgattctggtgtgttcgctggtgctgctggctatcgttattgtagcgaatacgctggctgcgcgttggctaggctttaataccgccgatgaaattaccattgtgttctgcggctcgaagaaaagtctggccaacgggattcccatggccaatgtactgttcccggcttccgtggtcggcgtaatggtattgccgttgatgatattccatcaggtgcaattgatggtgtgcgcggtgctggcacagcgttacgctcgtcgagtggcgcgtgagcgggatgcgagcgaaaaacgggagcagggcgaagcctgagttcactcatttatccactgatttaaatcataaaaaagggtcagatcatttccggcccttttttttattttatcgttttcacctgatgcgggtttaccgagctacacaggcaaagccgttaaccacgaattttatcgcgcagcgcctgcttttccgcttcactgataaaggccatcgtcaggccgttttcctgagcctgacgaatttcatcacgagtcaggcccgctgcaggagctgctacgtggtactcattggtaatttcaatcccctgaaccgccggatcgtcggtattgatggaagccaacacgccgtgacgcaggaaggtcgctaacggatgtttggctaaggaaaccacggtactggtctgaatattggaggtcaggcaggactcgataccgatattgttttctgccagataatccagcaggcgggagtcatcgatagctttgacgccgtgaccgatacgttccgcgcccagttcgtgaattgcctgccaaatgctttccggaccagcggcttcaccggcatgaacggtaatgcgcaaacccgcatcccgcgcacggttgaaatggttgaggaacagcccgccggggaagccccgttcatcaccggccaaatccagcgcggtaatgccgtcacggtgagccagcagggcatccagttcttgcaggcaggcctgctcgccaaaagtccggctcagaataccgatcagacgaatatcaatgtcgcgatcgcggcagccagcctgaatcccatcaatgaccgcttcaaccacaccggcaacgggcagttggtgtttcatcgccatgtaataaggggaaaaacgcagctcggcatagtgcagaccggcgttaaccgcgtcctctacgttttcatacgctacgcggcggcaggcatctaaatcgcccagtaccgccacgccccaatccagtttttgcaggaagcttatcaggtccggttcggttttggtgatttgcacatgagggcgcagcgcttctaactcattggccggtaacgtcatattgaactgacgccccagatccagaatggtttgggcgcgaatattgccatcgagatggcggtgaatgtctgtcagaggaaggcgggaatcgatcatggatgcactcacttatatttatgaatgatatttattctgggtaaagtgcagaacagtataaaaacaaatggatgaaaacatccagtgagttgcagaaaaaagagattcagatcacacttaataagccgttttttaataaattcgttgattgacggcccaaataaggcatatgacagtgaaaaacacaccctgcgttaagcagggtgtgaggatgggggaaggtttacgatatatcagcagaaactagcgaagcctaatgattaccgatgacagcgttcaaaccatttatcagtttatccattccgatttccaccttactgcgggcgcaaccgacgttaagccgtaggaagccgcggccttcttcgccgtaggtaaagcccggcattatcgccactttttcctgctcaatcagtacttcctgcaattggcggtcgtcgatatgcaacgggcgtaaatcaatccacgccagataggtagcctgcggcggttgccagttaagctgcggaaaggcctgatttaaccgttccgcgacgtattgcaggttggcctgtaaataggcgcgcagctcatccagccagggcgcgccctgacggtaagcggcaatatgtgccaccagcgccagcaccgccggggaagacaaaccgtcgcgacttttcagcatgttgctgtaggtttcgcgggtttcactgtcgctgataaagccgtaagcgccggttaacgcgggaatattgaaggtttttgaacccgatgtcagcagcgcccaaggagattgagccacctgactccacggcgtatggggctgttctccccaggtcatatccatatgaatttcgtcgctaatgaccttaacctggtggcgttcacacagttcggccatgtgcgccagttcttgcaggctccacactttaccggttggattatgcgggctacacagcagcaggattttggtttgtgggcgcgccagcagtgcttccagatgagccatatcacagtgccagtgattatccactttatgcagtgggcaagataataactgacgctgattgcccaaaatcaccttataaaacgcatcataggcgggcgtgtgagtcacaacgtattcacccggcgcagaccagcagcgaatcaattgcgcaaccatataaatgaccgacgggccgtacaccgccgtggcggtgtcgataccgcattgaaaacgtgcctgataccaatggcgaattgccccaagaaaatcttcgtgctgccagcggctataacccagaacgccgtgctccagacgttgggtcagggcttgcagaatcaccggcgcggtagggaaatccatatcggaaatggtaaagggcagcaggtcggcgctgccaaaacggtcggcaatataatcccactgggtacaccaggtaccgtggcgatctaccggcgtggagaaatcaaacatcaggctctcactttttatcgatgagggaaaaaacaaacggggcaccggagcaccccgcagagttgtattatcgagacttattatgctgaggctatgagtgagtctaattcatctttcaccgattgcacctgagggccgataactacctgtaaattatggtcgttcaattggatgacgcccagcgcccgattggctttcaacacctctttgtccaccttgctcatatctttgacggacatacgcagacgagtaatacagttatccagcgaaacgatattctccgcgccgcccagcgcctgcaaaatagcctcgctgttataaccggatttaccgaccacacccggcgtcggtgctttttctacgctggcgctgtcactctcgcgacctggcgttttgatattgaaatgctgaatggcaaaacggaaaatcaggtaataagccacgaaccacaggctggctaccacaggcacccaataccatttggtggcggtaccgtgcagaatgccgaagactacgaaatcaatcaggtttccgtcggtattaccaatagtgacccccagcagtgccattacggtaaagcctagaccggttaacagcgcgtggatcaaatacaggaacggagccacaaacaggaataggaattccagcggttcggtcgtgccaccgatcacgcaggcgactacgccggaaatcagcaatcctttaattttatggcgattctctggcttggcgcagtgatacatcgccagcgcagcgcccggtaaacctccgaggaaggcgggcattttaccttgagacaggaagcgagtcgcactttctgagaagccgctagtggttgggcaggaaagctgcgcctggaagatagtcagcgcgccactgacactgtgaccacagacatccatcgtgccgccggcttcagtgaagcgaatcagcgccaccagtatatggtgcaggccgaaaggcagtaacaggcgttcgccgctgccgaagatcatcgggccaaaaatccccgcgccgttaatcaagcggcccaaaccgttaatgcccgcggcaaaccacggccaaatgaggggaatcaataaaccgaccagccccagtaccacggtggtaacaataggaacaaaacgggtgccgccgaagaaggccaacgcatccggcaggcgaatggtattaaaacgctcgtgcagcaggtaaacgatgatccccacgatcaccgcgcccaaaataccggtatcaatcgactgaatgcctaaaatattttggatattgtgggttttcagcaccaaggggtcggtagtcggcaatacgccgctggtggtgagatagaagttggtcgccagattcagcaccgcaaaaccgacgaaaccggcaaaggcagcaacacctttgttttcccgcgccatacctaagggaatggcaatggcaaacatcactggcaggaagctaaaggcaaaggagccaactttgctcatccaagtgaataacagctggaaagccgggtggcctaacaccggcaaaagggtaataacgtctttgctgcttaacgaactcccaatgcccagcataatgccgcagaaggacagcaaggcgaccggcaacatgaaggttttccccagactctggaaaaactcccatagcgtaattttttgtttttttaccgccgacataggtggctcctggtgtgtgaaaaaggatctgttctgtggatctttagcgtcctgaggttaaattaagataaaacgtttaacctaaataatatgcgcggcaaatcacagttattgtggcctttaacgccggtaaatgaaattctgtgagatacgcccgaaaatgccattttgtcgatagaaactcactttagctcaagctaatgataagccgagggtgaagtttccagccataacaggcacgctgatgtttaggctcaggcaggtcttcccggcttttggggcgcaggcctggacgggtgccgccagtaggtggatgagaggttaaaatcgctatgtagcgcacagatactgattaaaacgattaatcgttttacccagattattgaattgggtgtaacatttgccccgaagcatagatttgtctgccaaaggacgtgagacaaaaatgataccgaatagccgcgatgaatcataaaaagatcaccattaccgatgttgccaaacacgccggagtttctgttgccacggtctcgctggccgtcagcggcaaaggtcgtatttcaccgacaaccgccgagcgggtgaatcaggccatcgaacagttaggttatgtgcgtaatcggcaggcggctcagctgcgcggggggcattccggggtgattgggttgattgtgcgcgatatcggcgatcctttttatgcggcgatgacggcaggactcagcgaagctattgaagccgaggggaaagtgctgtttctcactcaaagcggcaaagaagggaaaggtctacagcgctgctttgattccctgatagaacagggggttgacgggctggttcttggcggcggcgcgaatcaggaaagtggcctgaaagagaaggccgagcaacagggcatcccgttgatttgtgccgcgcgtgccaacgtattggacggcgtcgacgtggttcgcccggataatatgcaggcggccaaaatggcgacggaactgctgataggcagaggacatcgtaaaattgcttatttgggcggtcacggtcattcattgacgcgggcagaacgattgggcggattttgtgccacgctggtgcagtacggtctgccgtttcgttcggattgggtgattgaatgtgatagtcagcagcaagccgcggctgatgcggcggaaagtttgcttagccatcatcccaacgttagcgcgattatttgtcatcaggcttccgtggcgctcggtgcttattttggcattctgcgcaccggcagaggaattggcagcgctggggtggatacttatctcgatcagcaggtggcattgatcggttttggcgacgtacccgaagcagaattaacagagccgccgctcacttttattaccagctcggcgcgagaaattggctatagcgccggccagcggttattgcagcgtattgccggtgtcgatttgcaattgcaaaacgttattctcccgccggtgcttattcgtcgtggctcggtgtagccggcacgattggcgctattggcacgtaacaatccatttatccttctgttccagattcgctataaacatcgcaataatcctattcaatagtcgacgataatcgtccgatcaaacagagacaccgatccctgtctcaattctgactgcctactgatgatttagatatttggttcatttttgaaagtaaaatttagcattaacagctctaatgaatctgcgtgtattattctttaaatctatagttccaatccgttttacaaaaaagtgccggatgcatttttcgatttttattaaatcaaggaggggatatgccaattattagttctccaacgttgcgccgctatttaaatttaaatttggcgactaaagaattaaaaacgctggaaaaaacgaacctgctgaaggtttcaaatgtagtaatgacatgtttgaccagtacgtcgagcagcacaaaaaatataaataaaatcaacagaataaatagcatcatagcaaagataaacgatgtcagatatctcgccgtcgtagataaacgccgtaatgaagtcagtgaagagttatccgatttgatgcggatgaaagtgacgctaaacagattaaaattcatagaacaggaaaaggctgccgcggcagtggaagccagtaaaatagccgccaaagtgagtgaggccaatcatcgtcggttaatagaacaaagtcagaaagaacacatcatcaccggtttgctttattccagcaccacaccgccaaatatgaacatcgacccagctccggttacggctgaattgcaaaaactgccgctgaatatattaaagactgcggactctttggggcagtttataacattgaccaacgataatataaccaatcacccacgaatgaacgcgctgaaaggtcaaacgccgcgtggttggaccaatggcaaaacctgggattcagtccccggagttggggctttgggtaaaggggcagaaaatgagtttcatgccgatgaaaccgtggtggcattaacgcaactcgccaatggcagctggaaattagcgacggagcatggttctgccaatctggttttgcatgaatacgcgcatgccattgatcgcagctttggtgaaaaggcaaatatgggagataaaggtcttggtgaggttggcgatagtttgagctgccgtcaaagtttccgcgatatatggcagacggagctggggtcaacctcccaaaccgatagcaattattattattggcaaggcggtagcgacggcggcgcggaagaagcatttgctgaggcctttagcgatctttacggaggaacttcccagcgtccgtggcctaatataaaagcttatattgccgcaaaaatggcatcggttaatccggagaattaatcctgtcggatagagagttatcttcgccgtactgatattgctgtcattttacctcgggcgcagctaaacccacgcttacacatctacatctatcgataatcaggaacgtggccataaaaaatgccagccctgtagcaggggctggcattaatcattatgtttcgatcttggcccaatcagcgtttacctgaggataagcgacttcttgttccgaatcgatattactctgcggcaggggcttcagcagcaggggcttcttcttcctgcggcataccgccaaacataccgaacagaccggcaaattcctgcagcgtcattttctgaccgttcagatcgattttgttatcggcgaagctgaagctgctgctgataacgtcatctttggtcgtggtcagtttgaacatctggcccatcgcggcaacgccctgaacctgctgaacggccattttagcggcttcttcagcgctgtaaccctgcaaacgtgcagcctgagtcgtgaactcggtcgccattggcattgggatggtcagattagcgtcgattttcttgatagcacgagtcaggatttcttcctggctggtgattggcgttgtcactttgcttggatcggccagcacgacgtccagtttcagggcgctttcgcctttgccgtttttccagctcagcggagagatgctgaagctaggatcgcctttcagcaggcttggcagcttggtcagaaccagctcggtcatctgcaactggtaagtttcaggatcgatgttaccggtttgcagaccctgcatagcgatttggttgtaggaggtagcgaagttcttcactgcttcgccgtccagaccggcaaaggtaaagttcagcttaccggaaccaaagtcattaccctgaattttcagggaatccagcgtgtagctcagcttaccgttcaggtttttgtccgactcgcccatctgcgaagttagcgtaaagccatcaagaaccagcgcttctttgccttccacgctcaacagaacctgtttgatcgacagattctggtcgccgatgctgagatcaaacttaccggttttgctgtcgttcttcaggctaaggcctttaacagtaaaggtttctacctgatccatttcgtttttcttgaacagcacgatgctatcgctttcgccgttcagtttaacgtcacgcatatctttagagaaagcagcgtcaaggctggcaccggagaagttcaggttcaggccgtctttctcgtaggtgatagggatcagtttgatcgcagaatcggtgctaccgttataaccaatgcgtgaatcagcggtaaacggtgatttgcctttggtgatatcaaacaaagctttaaccgcagccgtgttttccagttcggagtgaaccgacgccatgctagggatcaggttgaatttcttcaattgagccattgggaaaggaccgtgatcgatagtttcgataaaggcgatctcttcacctggcttcatcactgcattttcgccggtgatagtcccgtctggttgcaggatataacggactttactgctgaaggttccgcggtggtaatcggtataagccagtttcagaccggcctgtggcgccagtcgtttaatttgtgaattggcgttatcgacgatttcactcatccgctgttccatcaatttgccggtgtaccaagaggcacctgtccatgcagcgccgagaacgacaataacgctgacagccactaacgattttttcatggttctgttcatccttttctaattcagcaaattcaatacgttgaacgcggttgtaggcacaataacgcccataagcgcgttattgtgaatgcaatagctactgattggcaacaaataagaaagatttgtaacaccaattagttaaataatgttgtaaacccgcgcaatatgaccagaaccgcggaggttaataggggattcattggcggaaacaaagcaggattccccaggttgtagcacaatctgctgtgagtctttttgcacaatactctgtccgtcgatacaaaagataatcgccgcgctgttctgctcgatgttttccgactcgtccgtcaggcgatgaatggcaaaggcaaaatcatccacagggatcgggaagatcagcgcgttaccctgttccttcggcgcggtcagtaactccgactccggcttgggaacaaatttcacgttagcaactaactcgggaatatcgatgaatttcggcgttaacccggcgcgtagtacgttatccgagttagccatcacttccagacccacgccgtccagataggcgtgcggcgtttctgcatacaggaacatggcttcacccggctgtagagtaataacgttcagcagaaggggggagaacaagccgctatcctcagggtagatttgcgcaatgtgacgaatagtatcccacggttcgcctcgctgattattcaacgcggatttcaatacgcccagcgctaacgctttttgctcgccttccatacttaacaggctggcaaacagcagcgccagatgttcggcatccggctgaagcaggaaggcgccgatatccggatgcgccgcagacactggctgcaatagcccaactaactgctctggcgtgcggaaaccattcatagcgtggaagggcgtcagtgcataaaccagctccggtttatggttggcatctttgtaattacgctcggcggcgtctaaaggaataccggcggcattttcacgggcataaccgatttccgccgcctgtttactaggatgaacctgaatagacagtggctgagccgcacagagtactttgaacaggaaaggtagctcgccaaaacgtttagcgactgcatcccctaaatggcccgacgggtcgctgtcgataagctggcgcagtgattgtggctgcccctgagcatcgactatttttgaactgcttttaggatgcgcgcccatccacaattccgccatcgggatatgttgcggattaggaatgccataaagacgggtcagggcgtcggtactgccccaagcgtagttttgtactgcattgatcatcttttgcatgattgaggtctgctgtctcagcggctgaaaggaattcaggccagattaaaaatataagctagtaaacaatgaggttagatgggttgcaaggattgcacaccgggaattatgctttttgccgtaaatttgcgcgacgatcccattgggaaggatagcaaggatgggaagtcatctgtgttcttggcgctgatattttggtcgttttagcggctaaaaactgcggtataaaaagaaggtttcccaacaatcgataacttggatagatactttggcaatgaaacttgttaaagaaaatatagattcatgaaccccagcgtattaccgccaaactgctggtgggcaataggcaataggcggtgagcggaaaatcggccgtttacaaaaaatcaacataaaagttatctcccaaacctacaataaaggcgtcccggtcgcataatcagaatgattgttatggcatgataatcattatcatcagcaactattattgctgatgttcgatacctacttattccgctatctgtgctaaggagagagtcatggcagccactcgcattgaaaaagactcaatggggccaatagaagtacccgccgaccacctgtggggggcacaaacgcagcgttcactggagcatttccgtatctcccaggagaaaatgccgaccgcgcttatccatgcgttggcgctgaccaaacgcgctgccgctaaagtgaatatggatttaggactgctggctgaagagcggggcgtcgccattattcaggccgccgatgaagttctggcggataagcaccctgatgaattccctctctccatttggcaaaccggttctggcactcagaccaatatgaatatgaatgaagtgttggctaatcgtgctagcgaaattttgggtggagccagggggaatgcgcgactggttcatcctaatgatgatgtgaataaaagccaaagttccaatgatgtcttcccgacggcgatgcatgtcgcggcggtactttcgctgcgtgaacatctgttaccggagctgaaagtattacaaaaaacgctagcggataaggccgaagcttataaaagcatcgtaaagattggtcgcacccatctacaagacgccacgcctctcacattggggcaggaaatttccggttgggcggcgatgctaaactacagtctgcatcatatcgaagcctcgattccccatatctgtgaactggcgctagggggaacggcggtagggactggcttgaacacccatccggaatatgcagtgcgtgtggctcaggagctggcaaatctgacccaacaaccttttgtcaccgcgccgaataagttcgaagcgctggcgacctgtgacgcactggttcatggacacggtgcgctgaaaggtctggcggcctctctgatgaaaattgccaatgatgtgcgttggctttcttccggacctcgttgtggtattggcgaaattgctattccggaaaacgaacccggcagctctatcatgccgggtaaggtgaatccgacccaatgtgaagccatgactatgctgtgtgctcaggtgatggggaatgatgttgcagtgaatattggtggcgcgtccggtaactttgagctgaatgtgttccgaccaatggttattcataactatctacagtcaattcgtttgctggctgacggtatgcgtggctttaatgagcattgtgccgtcggtatcgaaccgaatcgggatcgtattactcaacttctgaatgaatcactcatgttggttacggcgctgaatacccatatcggctacgacaaagcggccgagattgccaagaaggcgcataaagaggggctgacccttaaagcggcggcgttgaaactggggtatctgacggatcaacaattcgatgaatgggtaaggccagaagagatggtaggaagtatgaaggattagctcttccttaagctaaggatataagaagtaatgataaaagcgttggcggtgggaaagctgacgcttttcagttttagatgaccgcggttggtttaaggcagggttccggtcaaattccaaatagtcccgctatccatactttggttcaatacggaaacggaggcattcactgcgcctttttgattgataggatcggtgatcgtttgaactgaatgcgcgatcatggcagcagccaccgtgccggttcctatttgaacttgaatattggcatctcctgccgccgtccttccttgcatgtcgagacgggcactgcccacagtatgtaaagtcccagggccacggccaaggtcggcataatcaagcataaggataactgcctgacaatcttttcgttgtgcggaggtagggttaacaattccgcgaataggattttgagtatttgtcttagttaatggcatagtataccttccaattctattaggattatggcattgcgctgtgaaacgctgtgaaaatataaataatatcgagctctattaacccggaattataaatatgcctgattctggttataaaaataaaaaaaacacgaaagatttagctgcttaaataaattaagagtgaacattgtgttaatttgtttcttatgtgattattcaatcggctatattgtttcttgcgaatatttaaaatatcgtgtgacagactggattggttagcctgctactattttatctttaagaatcaaactaaaatcatttttatcacacaattaattatctatattctgtgtgatgagtattaatcatagcaataaacaataagactgccagagagtaagcgatatttttttcatcgcatcattgcgcgtaactaaatgatttaagttacggctgtttttggataatgggaaaataacccattgttttttataagcggaaaatccgctgagtcattcgatatctgtataaagatgcagtcgtggaattaacaaccgcaacggtttagcctgcggtttatgtttgtgtttaatctgtgtggcatcgtaattgggtagctctccaattttaggcataccggcacctaactctttttggcataaagcaattaacggcataggacagggatgctgcacctgcttttgctgttcctgataccagacacgggcaatgggctgaaccttgacagggcgtttaattttcaattttgcagtttcgggtaatctttgcacgtcggcaatttcttgacttacccattcggcccattcttctttggtaaagggcggcacggcgcgaccggcattcaggctcttatttagctgcgccagcaaatcttctttggttatatttttaattatattcttatttgcccagccgaatcgcactgaacttggattaatcaatggggtgagggtgcggtaagtatttagcgtaatcaggccgtgcaggtgagtgtgaacgaattcaaagcgttgctcgctgggcaggccggactcaacggtaataatctgctctaactggtgtttcaattgattaatatgttcaatcagggtgatgcagtcccgatattctgtcttattcaatgcgaaacacagtacgccggggaggcgaacggccgctttgctgctgacattttgcttattatgatgaataaacaggcgacggaagtgctgtaaacccaattcgcgggcttcttctccgactactggcgtgacgttaatctgttcaatctcttcatgctccaagcctttttcgatatcgggcagggtgaagacttgggcggccaataatggaaactctgccagctgctggtggagcgacgccaatgataattccagttggttaaaactggtattcattctcaaaatcaaatcgtacttatccatagagttatctcgttaaaaacacgctttagttacaacatacattaagcttcttgcaaacaacagtgcgcattcaagcaaaagtgcaaaaacattaaggacagagctaaattcttcatgcagaacgaaggggggccgtgggcagaattatgattttactaaacggttatattaattttttcataaggttagctttatgctggccgattagtgtagcagaatacgtgggggactatcgggcgaatatgtctgacttttcgatatgaacggcttatcggtatttctggatgctcgctattttttgatcgaactgatgttgattatttattccctagaaaataatcccttagatgtgaatctgggtaagcaggctctggttaacgcccagagccacgaagataaatattcaacagttaaatacgcgcagcttcaggtaacacacgtaaacgttggccgacggccaacgcaataagcaacagcagcgcgataaacccggtaacgccgtaccagcccaaattcagccagaatatgcctcccaaggtgcccgcgacgctggaaccggcgtaatagcagaataaatacaaagaagaagcctgcgctttggcgcgtctggcgcggcggccaatccaactgctggcaaccgagtgtgctgcaaagaaaccggcggtaaatatcatcatcccaatcaatatggcgataaccgatgaaaatgcagtaatcagcacgccacccagcatcaggccaattgaccagagcaatactggcccacgtcccaaacgcgtggtcagggcgccggctttaggggaactgtaggaaccagtgagataaacaacggacagcaggcctaccagcgcctgactcatcccatagggttcccccaataggcgatagccgatgtagttaaacaaggtgacgaaactgcccatgatcaggaaaccctcggcaaacagcagcggcagaccggaatcgcgccagtgcagtttgaagttaatcgccagcgttctggggcgtagcgaagtggcacgaaagtgtcgggaaggtggcaaaatacgccagaacatgaaagcggcggccaacgcaaacagcccaatcaccgccagcgctacccgccaggaaaagaaatcgcttaatacgccggcaatcaggcgtccgctcattcccccaatcgagttaccgctgatatacaaccccatcgacagcgcgacaaaactgggatgaatctcttcgcttaagtaggtcatggcaaccgccgccacgccgctgagggataaaccaattaatgcgcgcattaataatatgccgtgccagctggtcatcaaggcacataccagggtgcagatcgctgccagcatcaatgacaccaccatgaccggtttgcggccaatcgcgtcggaaagcgggccggtaaacatcaatcctaccgccagcattccggtggcagtggataaagacaagctgctactggcgggggagataccaaaatcttgcgacagcaaaggcaaaataggttgcacacaatacagtaaggcgaatgtcgccagtccggcggagaaaaaagccagcgtgacgcgaataaactgcggtgtgccgcgttggatataaggacgtttattaatcggtaaagtcgaggtgtggcgggcagaggcagtattatcattagctaccggtgtcggcgctacagaattcgcagagcgcaaagaggtgttcactttcattccttatccaaaaaaccacactaaaacaggctgtttgccccatagaaagggggaacacagtgatcataggaatagcgcagttttttgtctaatatattaataattgggaataagacgtttaacctattaatggattttcatgccaatcgaactcagacacttacgctattttattgcggtcgctgaagaactgcacttcggacgggcggcggagcgacttcggatttcgcaaccgccgttaagccagcagattcagattttggaagagcaaataggcgcccggttgttagctcggaataaccgtaacgtcagcctgacgcaggccggagagctatttctcaaagaggcttaccaaattttggcgcaggtcaatagcgcggcggaaaaagcggggcggctgcaccgaggtgagttgggtgagctgaccatcggttttacatcgtccgccccctttatcagcgtggtatcaaaaaatctgagaatatttaggcagttgcatccatgcgtgcatataaaaatgcaggaagtcaataccaaacagcagattgaaccgttgcttgatgggcgtctggatctgggcgtgatgcgcaatacgcgtttgcccgatgcgctgcagcatcgtttactgctacgggaacctttggtcgcggtagtccacgaggaacacccgttggccgcagtgccattgggaacgctgaaattccatatgctagcgcaggaacctttcgttttttttgctcgtgaggtaggaacggcgctatacgacgaaatcttgaatttgttggcgcgaagcggcatcacgccttacatcacgcaagaggtgggggaagccatgaccatcgttggcctggtgtcttccggcctgggagtttcgatcctgccagcctcctttacgcgggtgaaagtggacggagtgaaatacctgccgctggatgaacctgaggcaacaaccgaggtgtggttggtcaatcatcggcatcgtcccgttactgctcccgccgacgcgttgattcgtttaatgataccggaaacggtggcgcaatctgtttgaataaacgccttaaagggtgatatatactgggaatgtgtgcagtaaatcacataactaatcaaatagttgacgccttataccaaaagccccaacatagccgttaatatttatttagaagcgcgaaaatactcggtaagtggcaaagaaggagccggttttgtgattatggatggacagcctgggcatattgatcaaatcaagcagaccaatgccggggcggtatatcgcctgatcgaccattttggcccaatctcccgcatcgaactctcgaaacgcgcgcagctggcgcccgccagtattaccaaaattgtgcgggaactggttgaagctcacctggtaaaagaaaccgaatttcaggatgtcggcagccgtgggcgtccggctatcgggctagtgttggataccgaggcgtggcactatttgtctggccgcatcaaccacggcagcatcactcttgcgctgcgggatctcagcagtaaactggtggttgaggatttactcccactgccagattcccaccccgaacccttgctaaaccgcattcttaacgaagtagaccaattctttatccgccaccaggagaagctggaacgtctgaccgctatcgcgattaccatgcccggcatgatcgatgcacctgccggtatcgtgcataaaatgccgttttatgatgtggatgagatgcgcctcggccccgaactggaacaacgcaccggtctgccggtattccttcagcatgatatttgtgcctggactatggctgaagccttatacggtgccgccaagggcagccagaatgttattcaagtggtgattgaccataacgtcggcgcaggagtgatcaccggcggcagggtgctccacgctggtaatcgcagcgtagtcgaaatcggccatactcaggttgatccttatggtaagcgctgttattgcggtaatcatggttgtctggaaaccgttgccagcattgaaaatatgctggaaatcgcccaacagcggctcaatgtctctatgagttcgttgctacacagttctccacttacggtggaatcgctatgtcacgccgcaatggcaggcgatcagttagccaaagatattattctgggcgtgggtcatagcgtgggtcggattctggccattatggtcaatttatttaatccggagaaaatattagtcggctcgccgcttaatctggcgtcttctattttacatccagcaattgaatcctgtattcgccagcaggcattgccggcttacagcgaaaatattcaggtagagtccacccgattttataatcggggaacgatgcccggagcagcattggttaaagaggcgttatataacggctcattattagtgaaattgctacagggttaatccactgctgctaataacttagagttaattattaataggtattaaatactcttttctccgctaatgactctcgcgccatccgctcgttagctaaaaaaacattccagtccggcaaaacattgcgctaacgcaagctgtttatcttcatcatcgcctagacttttcagctcatcgacaatttcgccaaggttcggcgggactattttgagttaaaacggcaaaattgcggagtaattcctttatgttaacgcgcgtatttgttactggaacggataccgccgtgggtaagacggtggtgtctcgggctttactgcaaactttcagtcagcacggtaaaaatgctgcgggatataagccggttgccaccgaaagcaaagaaacaccggacgggctgcgtaacgcagatgccttggtgttgcaggcttcatcatccattgcgctagattattcggctgtgaatcctttcccgctacatgaggaagtgatccatgccagcactgacaccctgatcgactatgatcggatgagcgccgggttagccgcgttagagcaacaggctgatagcgtagttgtggaaggctgtggcggctggagcgtgttgatgaacgatcaacgcttttattccgaatgggtggttaaagaaaaattaccggttattttggtggtaggaattaaattaggctgtatcaatcatgccatattaactgctcaggcaataatcaacgatgggttacctttattaggctgggtcgctaataggattaacccgggtttagcgcactatgcagaaactattgatgtattacgccaccagatacctgcgccacaattaggtgaattgccttatttacctcggccggaacagcgcgatctggttaaatatctggatttatctccgctgattaaagagtgaataagttataatttttgcctcatatctcttttattttatatccgattttggcggttatatttcccgctaaatcggcggcttatcccgaatggtaaaccgataatggtcttatccaacgggcaattgccgttgcgatcacgcaagataataataagcccggcaagagcgtgtattcgcccgtcatttcacacaccatcagagccgccataatcggcgcatgagtggtggctgccagcagtgtggccatgccggtcagcgccataagcagggcgacatgttcacctaaagatggccataaggcgaaaatctgcccgatcaacatccccaaggctgccccgacaaataacgtcggggtaaacacccctccaggcgcaccagaaccgctactggctaataccgcaattaatttacagatcagaactccgccaatcagcaatattcccggtggtacggccagcatcgattgcaccacgctataaccatttccccatacttcagggaatattagcgacagcaaaccaacgataattcctcccagccccaactgaagcggaagggataaattcagggaacgaaaaacatgaccgctggcggtcatggctttcaaaaatagtggcccgctaaatccagcaatcacacccaatgtggccatcagcagatattgcatcggtaacggagaaggaagcgcctgcacctgatataacggtgcctgttcgcctaagagtatattagttgttaacagcgccgtcactgcggcaataatcacggggcctagcgaagccagcattaaagtgccaaacagaatttcggcaataaacaggctacccgctagcggagcgtgataagcactggccataccggcggccgcgccgcaggcgacccaaagcttccactcgttagctttggcatagcgttgggcaaaaaccgatgcaaacagcgccgccagcagcaccatggcaccttcgcgaccgatggcgctaccgctggataccaccaagagagaagcgaaagacttaaccaaactggcagagatatcgagccgaccatcgccaatctcgatcgcctccatataatcggtaggggctgtgggccgttgatggcgatagcgctggaataaccacaacacaccacctgccgccactccacccagcgccggtgttaacgcccgccgccagccagaaatcgaggaggcagcggccaccaaactgccatcggtacgggcaaatagcagccactctaaccccaacatgccgcggtggaacagccagacaatcaccgccgaagtcatccccagcatgattgcaatcagcaaccgccgtaacatggcgcgataaaaatgatgatggagtggctttttcatgcgtcgcgagttaactgattgaattcagaccaccattgttacttggccggatgtgaatggctagtgaatatttagcttggatcaaaacggagaaaaatgcaggcagttttcgttaaagaagaacaatggaagtaaaaaggaaagatttaacaagctagaagctcccgccagaggctggccgcaaggcgggagcaaaggcgattaagcgttatttttcagatgtcagcgtgaaatagctagtcatcaaattacgataatcaggaatgtggttggagaacagcgcgcccagaccttctacgtcattgcgccagtcgcggtgcaattcgcaggctgcgccaaaccatgtcatcagctgagcaccggcggcagacatacgatcccatgcggcatcgcgagttaacggattgaaggtgccggaagcatcggtaatcacgaacacatcaaagccttcttctaacgcggacagcgctgggaaagccacgcaaacctcggttaccacaccggcgataatcagctgttttttaccggtggctttaatcgctttaacgaaatcttcgttgtcccaggcgttaatttgtcctgggcgagcaatataaggcgcgtccgggaacagggcttttagctcaggaaccagcgggccattaggaccggtttcaaaactggtcgtcagaatggtcggtaagttaaaatacttagccatatcggccaatgccaacacgttatttttaaacttatccggatcgatgtcccgcaccagagacaacaaacccgcctgatgatctaccagcagcacggctgcattgtctttatcgagacgtacatatggtttgttcatttctcactccattgtttactacctgaatggccgttggttgatataaaccaacccaacagcgtgtaatcagcggctaattccgctgagcaactgtgtaataaagtatagataaagttccaataagtgataagtagctcaaattaagccacagtgttccataaacggaacaatgagcttagcgcgaaggaagagggaaccttattggcgaacggaggaatagtgcgcttcagaccggatcacaacgaggaattttggaatggagaaaacgtaaattgagaaaccgtaaaaatagaaaagggcgcaacccgtgcgccctgatgaatatagcttaacgaaactattcgccgctggtaatccgggtataaacaatcttttgcgtatcgttttcgcagtgcccaacaacttggccgccggctttttcaacctgatcgttaggtacgatttccagcgtaaaacccgactccggtacaccgttattgataatcttttgcgcaatatccgctttcacgctttcgcaagatgcctgtgcggccaaaggcgcaaccgccagtaacaatgtgccgataataagcgtttttttcatcagtaaatccttatttgggatgaattgctagtgtcgctaatagtagttcagacagcctgaacttcaagtaaaaagcaccgttcttagctattaaggattaatcttatggccgctttgacgatctaaacaacgctgggtattcggttcccaataggcattgaaattagagctgctcaagcatttatctttagcatcttcagcaacgtcgtatttgtcgaaatctttctctttacgcgtattaaccttattacgtaggcggcgggtttcatcccactgttctttgctttgacgggcggcttctttcgccaaagggtcattggcattattgccgccaacggtaacgcaggtgcttccttgcgaacaatgacttaattgcgcctgcgccatagaggaccaggataaaggcagcatcaataccgcagcaggcaacagaacgcgcaatgcgatacgcaggcgattgtttttcatcattaaatccttctttatcgatgagttaagcgactcattttgtttaagcatacaaacctatagataaactatatcattgctctgtgacgatgtacccactaccgcaaactcatttaacctttagagagaaaactcgtcgttatgttgaagacttcattacttttttttgccaccgcactcgcggagattataggctgtttcctgccttacctctggttgaggaaaggggcaccggcctggctgctattaccggctgcggcgagtttaggcctgttcgtctggttattaacgctacatccggcagcaagtgggcgagtgtatgccgcctacggcggggtttacgtggctacagccttaatctggctgcgagtggtggagggtataaagctatcaatgtttgactggttaggtgcaggtattgcgttgattggtatgctgattatcgtggctggttggcgggtcaattagcggaaatcagtgaaagtaatgagtaaaaatagagcacagtgacttcactgcgctcgatctgacaccgcgtattatgattctcgatgaatgttcaacccagcgaatgattggctaaccggcatcatttctaacgtattaatattgacgtgagcgggcagagtcgctacccaatagaccgcttcggcaatatcacctggcatcaatgggttagctccatcataggttttattcaccttttcatcatcccctttgaagcgaacggaggaaaactcggttcctccgaccaatccgggttcaatatcggtcacgcgaatacgcgttccgtgtaaatccgcacgcagccctaggctgaattgcttcacaaaggctttagtagcgccatatacgttgccaccggcatatggccagtttgccgcggtcgagccaatattaatcacgtggccaatattacggctgaccatttctggtagcaacgcgcgagtcatattcaccaaacccttggtattggtatcgatcatggtttcccaatcatcggcattggctttgtgcgcgggctccaaacctaatgccaaaccggcgttattcaccagcacatcgatatttcgcagtgatgcaggtaattcgtcaatagcctgttgaatggcggcgcgattgcgtacgtccaaccgcaaaatatgcagggcctcacctaattcgttcttcagttgctccagtttttctaaacgtcgcccgctggcaataacctgatggccgtggctaacaaatttacgggcaatggcttcgccaaaaccggaggttgcacctgtgacaaaaacgatcatattccgttccttaccaataaagtggggcgataactgattttatatcattagcatactcggataatttttatcacgatataattaccattacttggaaagaatccgaactgaatagggtggtcatggttaaatcgtgaccgaatacaccgatgtgcgtcattttcttcggttactttaccggaggcaacttcatcacggtgaagcaaaaaggaaactaacagacagggagagaaaataccggggagctatattcctctttgattcgctacagcctctatcccgagcagattaagacattatagcgttacaagagagtctcactaaaaattaccgattgtgcttatctcaggtaaacattaatcgtgacgcattcatatggtcactgataatggaacgataaaattctggtgccaatatgaatggcaccagaaaagttcgagcataagctattatttaaagttatggttaatttaactttataattctgagtttcgctttgtagtgctgtgagtaataaatttatatagggatattattttttttggttgttatcgcagcttgtgtaaaaatgaaacacctcacattataattcagatgggaaatactttttaactaaggcggaaaggactgcgagcgtttcttcatccattttaccgtcatagcactctgggcgaaaatgtagttggaaagctcgaattaaaatctcataacctatgttagtatcagcactactggtatcataaccataaatattaaataattttagaatttcatctttatccggcatggagtgattatactggcataaatattcattttttgtttcatcatcataccaggctccgacgccacacatatacagttcaaaccacgggaaggcagccccgggatcacttttacgccccaaggaaatatctgaatgagccaatacatgggtgggggatatatccggataacgttgtaagatgttaagcgctaaatcttttacggcttcaatttgctcatcattatagggtgggaaagtaaaattaccattattatcagatgcctggttaacaatctcaatgccaatcgaactgtcattcagattggttcgctggtgccagcgactttcccctgcatgccaggcccgatcattttcatctaccaaattaaatatacgcagctcgtcaaatccggcggctatatagctcggatccataggatctggaattaaataatgcgaactgactaacgggccagttaatgcggtgatcgaaccggtgaaatcaacgacggtatagtggagaatcaaatatctaacgcgtttatcgaatcctttcacagcacggaatgaattataatctatatttattaattgagtgttttccatttaagtactccttgttatttgtgaatgattaaaattattttattcatcttgccgtccattaacaccgattgagatttacattaatttaatttaatcgaacgggcaagtttgattttaaattatggtgcgaacaacgaccgttttatatcactaagtcaatgtcgtattgaatagaatcaatagcatatagagatgacaaaaagtcattcagctcatctgattggtgtgaaacttaaaaatcattaaacatgacatctgaaagttgtgtgttacttatttaatagatttatgaatgggccggggaaactaaaaaaatactggcgcagcatttatcagatacaggatggttcaggattttatttctactaaattgatatcttcgcatcttaaactcgctaaaatgacagagactcatattaatgacattatggatgggatgcttagttataatattcaagtaagaaattattattttaaccgcctgttgaagaaccaataaagagccaatgtagccgctacgacctggaaaaagttatgctggtaaatatgtctgtggccatgctgacgaccttaggttaccccggcgctaattggctggataacgtatctctctgatctgtatgtggcattttttgtggttgtggccgtattcctgattattactttaggtgcctatacattacagtattagattttaactgagtggcaattgtgccttttatcctgattatcttataccgcaaggagtttcaatgagcgtcaaacttatcgcagttgatatggatggcacctttctaaacagcaaaggtcagtataataaatctcgtttcagaaaactgtatcaacagttattgcagcgcggtattaaatttgttgtagccagtggcaaccaatactatcagttgaaaagttttttcgatgatattgacgaccaaatagcttatgtggctgagaatggcggatatatcgttgataaaaaacaggaagtttactgtggaaagctaccttctgcgcaggtggctcaagtgctggaatgcatcagtaccttatcgggaatcaattttctggtatgcggtaaaaagagcgcttatatgctggagactggcgctcccgatttctttaatggaatgcgtacctattatcaccatctcaacacagtctctgattatgcgcagatcgatgacgttatctttaagtttgcccttagttatgaacaagatgacgtaagcgggctgatggatgaaataacacaaaaaataggtgacattgtcacaactgtttctagcggacatggttctgtagacctgataattcccgggaatcataaggctaatggtatcaagcgaatccaaggcatctacggtattgcagataatgaagtcatggcattgggtgatggcggtaacgatctggagatgttaagacacgcaggttacagtttcgctatggaaaacggctcgctggcggcaaaacaagcggcgaaataccgtgctccggcaaataatgaggacggtgtattaaaagtgatcgatgattgcttgaataatcgaccaccatttgatttataccacaaataaatgatgcaactacgtgaaatcagcagggtcatagccgatgatttttctcagatttcacgtagcgcgatcggaaataggcagtggtttgctgctatagccaacaattaatcgatgaacatcccgtgagcatctcgattaaaattaatcttaacgcagtgtcattggtcaatgggtagtcaggtcgttcacattaaaattggttcagaagaactggagtactcgaaggagcaagttgagtgagcgaagcattcaatgagttatcggttagcgggaatacatgtcggtcagtaaaagatataggtaacaaaagaatgaagctgtgaatgaggaatgtttgcgagcttgactaaggatgagtgcattattcagaatcaggttttagttgggataaataaaacccaaaatgagcctggaatgaagagcaacaggaataaacagccaatggataaggattaaggccaaaatcgggaaactcacacacctttacctcggttcgcataatgtatattatgttaaatagaatatgatggttgttaatgagttcatgcaccatatctcggtgtgtttattaagcccttccctttaacagagatgcctcgctaactttgccataacagcgcttgacctccgtccttccgccttattgattaaatacccgccacggataatactgctaaagtaagattctaaaatctcgtggaactggacatgaaaattattatcatagtgcttgtgttgtgtatgagcgcctgtacatcttctaagcatataggtattagcggcggttcgggtgggatttcgggcgttagcatgggcactgttattcggtaatttaccgcgtatgtggttgattatagtgatgacgaataccgcctttcgcggcatgaacggttgtttccctcgtaatatcctcgatgcaatctatggtatagagaataaatgtgaatacagtcaggaaatgtgggacggttatcaatagataccttttttgttaattttattacccgctatgacttaaaaactctcggtttgcagtaccaatcctaacgcagaatatacaggccgttgcagactgacatgatgatcagtctgcatacagctgagcgaagcaaaaccgagagtgaaaatcaaacccgcgcttggttaattaaccacgtaataagataaagtggctttatcgaggtgaatatcacatcgattcttatcctcatgaggcgtttccgctacggtagaaaccagccattgccctttcgccgtaataggtagcgttaatttcccattgctgtccgtctggccttttaaatccacatcttcaaaggcgtaagtgtgcgccaaggcgggatgagacaatgtattatttttttcatgggcgtgatcgtgatgatggtgttcatgaccctgtccctcggcgtcgctgcgttcctccccatcattaaaaataacgccaaaggtgtgattcgccaaaggtttaccgttatacagcagttgtaattccaaatcgtcgccaatcgacagttcattcggattctgtaatgggacaaactctaatcttaatcccatcggttgggtaataaacggattggcatcgggatttttcacaaagctgatggttttaccggacatagtgttatcggtgcaaaaactacctggccattgggttttatcttcttcctgacgccattcgtctttctcccctacgcgcttcactgaccaaatagttggcttataggtagacagagcgatataagagccaggcttcaagttctcctgctggaatttgacgtttttaccgtcgatgttaaaactgtattccttactgccgttggtcaattttagcggggcaaagaaatgcagtctttgagccggaatcgcttccccatgtggaaatccgtgaccataggccatttctaccgttgccgtagtggtgttcgccggaggcatattggtccataaatcatgggcgctgaccgttgaatgtaacaacgaagcgcacaggccaagagaaaaacacagggtatgagttcgattcatttaactactccatatttaatatccaacaatatctggacgttaaggtcagctatcccttcccggccacagaatttgagtgtgataatgtaacaaacttcatttcctacggcgaatgttttgttatgttataacataattatcatcgcggtaattaacgatatctcacaaagtagcgatagtgaacatggccgcataaatgctctgtaatgttctgcatgaagccataacccccctttcccgttgaagaatgatgaattagtgctttcatcaccttttctatcgtatgattgaaatcatatgcatttctaacaacttgattcccccaaatacgacagccgtcgctcacgagctcatttccgcttttcagccacgagctatagataaaatccggtttatagctatttttttataactgttttttataactattttgtttatcacccctaggcttgcaatgactaggtttatagacatgaggcgggaataattaagcctcctgaaaactgccggagagaatcattcagtgagaaattacgatgaaaaaaagtaagacgctgttctggcggcacgctagcgccctgtttggttgggcgttaatctattatgttgcgggtgtggtttcgcaacagtttgattccccggcgtttcaaatatctctggtgtggtttccctccggggtggctgtcgctgcctttttggcggtccgctggggctcgtggccgctgctgttctttattttttcgatggtgagcgttctacttgaacaacactggcgcgaagatgtgctcagtgcgttgttctattccgtcctgtcgttacctgccagcgtggttattgcctggatagtgcggcgttttgctcgccccaatgacgatttgcacgctattttactgtggataagcgcgactcttattatcagcgcgctggatgcattgataaccggtggcggaattgcgttggcggcaggtttaccgctattcagcctgttctgggtcagcctgattgccgacgtgaccggcattctgtttgtgaccatcattattatgggtttcctgaatatcagagtgcgttccgctcgactcacgctaagggcaaagctggcgggagccgttgtttggttactcctttgtgctagcacctggctaatcttttccggaaaactacaggatttcgcggccagcggcgccgcgctgtattttgcgctgtcctgcattcctatcgctatcgctatcgtgctatcgattatagccggtaatcggggcggttcgctggcattgctgacattgggtgccattgtgattttttatacctatcaacaccaaggtccattcttcttacaagggcttcatagcggcgaacccttgctgctcactcagtgttatctgaccgccacggctttattgatggtattcctgcgtggattatctcactcaatacacagtttcaacccagaaaccggtcgtattgaaggagacggggtgatgtaccagctaaacctggaatcgggcgaaatcctgtgggatagcgacattggtgccctattcggtgagcgaggatcgaccgctttcctgcatattgatgctgtattgccgcgcatccatccgcaggacagagaaaaactgaaacaacattggcgggcggcagaaggtcgggagccgcaaggtgctttggcgttgcgcatccggacagccaacggagaatggctttctatcgtggatggcggctgtgtgctgctgaccggtactgaaggtaatcgtgtgatgggtaactggcaaattagccagtacaactagattagcccgtacaaacaagggaaatagaggtatgaaccgttatttaccgcagagatgcctactatgattcaaatcgccctgctgttatttggcgttgattttgtccgctccaaagcccgatttcttggttttcttggcgcagtctggggattaattggcatcgggatttttatcgatggtatcgatggtacgctgtattttcccataaagacctttggcgtgctgctattactggaaagtctggtgacgctcagcgtggccgccagcggcgtaggcgcacaaaaagcagtgctgtattttaaaggcgggttgttttgtttcgtggcgctgctgatcctgtcgaataaaacctacagtaatctgctgctggcgattatcttcggctttgcctatttcattattggtgcgttagtgattgcttccgcctgggtggttcgttatccccgctggaaacaggcaatggccggcggaggctgtcagattctattcgccatgtttatgtttagcccttatcccacgcactatcaggctactgtgtcattctttctgggtgtcctaatgtttatcagcggggtgaataccctactgctggcaaggcgcgccaaccagttgagtgaaggcacttcggtattcgcgctgttggctccttcggatattctgtccggattgaccaaaaagtctgcggcaaaaccgagggcacttccacctgagcatgtggatttcactggaccactgaccgtgcatatctggacgccagaaggtgccgcgagtgccagaaccattccgcgcccagtgatcaatcgctatattgcggcggtggatacacaaggggtgatttccaccggccatgcggcgctggaattatcgccgaaagtgtacatcagtctgtatcccgcagcggatatcgatcgttctccatccgagttcttgcggttgcttaaggctacgcgcgataacgacgttgacgggagttttcagccggattacgccaccgaagcggccaattggtgtgaatcagacagaaaaatattattccatgaatacaacggtccggcgcttttgcgctattgggacgtttatcagcgccagaaaacctataacctgacatcacgtaattgctccagcagcgtagcatacgcgttagaagcgtcattagatggcgtactggccgaacaggggaaacactggcggccagcgttacgaaccttgtttatgcctgaactgtggatcgcagctcaggttcgacgacgagcaataaccatggcctggacgccgggtttagtgatggattatgcccgtgcgctgcgagcgattgtgcatccggtgccacaatcctggtatcagcgaatgccgtggaaatggcgcgtaagcgatgataataaggcgggaacagaaactgataagattttttagacccaatcttgttgattaaaagtgacggcgtcactcattcggtgacgctgtcgtcgcattctgaaagcgtaggtagcgaaagtttaacggaacggaggctcgttaaaggtgcgcaatttacgcgagtgtaattggtcgccctcttcgcgtaacaaatcaatggcgcgaatacctatctgcaagtgttcggaaatcgccccctcataaaaatggttcgcctgaccgggcaatttgatttctccatgcaaaggtttatccgaaacgcacagcaaagtaccgtaaggaacgcggaaacgataaccctgagcggcaatggtcgcactttccatatccacggcgacggcgcggctcaggctaaacctcagcgctgaagcagagaatctcagctcccagttacgatcgtccgaagtgaccaccgtaccggtacgcaaccgctgtttaacctctttccccggcattccgctaaccgctttggtcgcgtcatacagcgcccgctgcacttcggcaatgctgggaatgggaatatccggcggtaatacggcgtccagaacgtggtcatcccgcaaataagcgtgtgccagcacgtaatccccaatcgcctgactttcccgcagtccgccgcagtgtccaatcatcagccaggcatgaggccgcataaccgccaaatggtcacagatcgttttggcattggatggaccgacgccaatattcaccagcgtgattccctgcccgtttttagcgatcaaatggtaggccggcatttgatgttttttccacgccaaatccgaagtggttttttgcggatcggcgttttccgccgtgataaaagtgcctccggcgcaggataatgcctcataagggctactcggatcgagaatctgttcgcaggcccaactgacaaactcatccacgtagcgactgtaattggtaaatagaatataaggctgaatatgttcggctggcgtaccggtgtagtgtttcaaacgcgccagtgaaaaatcggtgcgcagcgcgtcaaagtgagacagcgggaagttctccgtcgcggtatccaatccatcggtaataccgtcgccaatcttggctagatcggtggtgggaaagtgctgcgccaatccggcggtcatggtgcggtctaataccagatctgaaccgtcgatcacaaagggatagggcatatctatttgtgacggcgtcacttcaaaacgtgcgccgtactcaccttccaacagagtcaactgttcggtgagatagcgacggaacaacgctgggcgcgtcaccgtggtgctgtagcagccggttcgggaaaaacgtccataagcgcgggtacgaatattgtcgcggaactggccttcccaactgacgcttagctgaggataggcaaataaacctttggcacgttctgccgcatcgggcagttttccttcgtgcacaaagtcgctgatagcttctcgcaacgcaactaatgccgcactgtacagcgcctcgagtttatccaacgcctccgatgcagtgagatgaacactatcttgcgtttttttcaaaatatctccttaaagcaaagggtaaggcgtttgatttagcttactaatatagtcgtctttaggaaatgattgatatagtgatttagttttatcagaagaacaaacagagccaccttcctgaatcctttcttgtgaaataaacagtatggctctctgcacaaaatggagcattccaagctgactactgccgaaatcatctatagtgttctgtctgctatatggatgacagattttctgaaaatggcctcagtgctgaaggaaccatggtaaataatataaacggccccgatcatactaacaaacaccctatggcgggttttccgcaagtttgttacatcaaaaatacggtaactaatcccaatattattatcggagattatacctattacgatgatcctgataattccgaggattttgagcgcaatgttctgtaccacttcccatttattggagataaattgattattgggaaattttgcgccattgccagaggtgttaagttcattatgaatggtgcaaatcacaagatatcaggcgtctcgacttatcctttccaaatatttggaaacggctgggaaaaagtagccccttctcctgaagatctcccgtttaaaggcaatactgtggtgggcaatgatgtgtggataggatttgaagcgctaattatgccgggagtgaatatcggtaatggcgcgataatcgcgtcccgttctgtcgtaacctcagacgtaccggcctattcgatcgttggcggtaatccagcaaaagtcattcaatatcgttttgctccagacctgattgttaaacttgagcaactagcatggtgggactggccagtagaaaaaatcactcagaatttatcgttaatagtgtcggatgacgtgaatgcgttggtttcaatcatggatatctagctaatgttggcagagctgacctgcggcggtttccccgtggtcagcgagtaagccatatgaaatagctataacggagactatctgcgccaaacggtaattccgactttccgactttatctccctccctccttttattcatgccgaattaatcagcgtcgaacagtttatttattttctctcgattcttaccttatttgtaagaaatcagatagtgccaatcactgccatttgaataataagttcacgcccatatctgatattcaataccattatttattaagtagttacctgtgttatgtcatttgatttggccagtaaagatgtggaatctaggacttcccacaagggagaaaaaaggtagcgccaaatggcttcaaggttataggcgctataaataacaacattacaccctttaaattaagagagaaatatatgacgactaacaattcacaactgagacatggccgaattactactcctaaaactcgcggattagtggcaaccgatttaggattaatcggcgaatgggaaaataatgaaatggaaggcgggaaaaatttccctgacttaaacgcgggtccggttcctgcgccgttccaggcggataatccaagtaatattcctcctaaggatgggttgattctcagcggcggccacgcaggcaaccgtgaatcggtcaactttaccgatcaggaaatgcagcaaaagctgcgagcgctgggcaaagccgatgacagtttcagttggcctaaaattgcggtaaaacctggcgagctgtttgacgtcaaatgggcctacaccgcccctcacaccactcgcggttatcgctggtttattactaaggacggttggaatccgcaggcgcgcatcactcgcgatcagctggaagtggctccgttcagcgaagatttctacccgttcgtgccttattactcacatcaggctaaattggtagcaaaaaccaaccatcaggttcttttacctacaggtaaaaaaggccatcacgttattgtactgctttggatcgtggcgaactctggtaatgctttctatcaggcatttgacgttgatttcggtgcataaaccccatgggtgatgcttgactataattgttatcgcgacgccggtctgcttaggagtaccggcgtttttgccttgtttcccgcttttcttctttaatgtccctcttttgtacactatccctggttcgcccctatcttttcgcgtcaatttattccgtatagcgattgtttttgataaacaaggggtggttttgccacctattcaagcgtttgattggtgttaatgagaattaaagtatccgctgttgcagataacacattattttctgcgttagacatctctcataaagggtcccttttgcgtggcaaaatcatttttacgcagtggaaatttagatgacatgcttgccttgggcgaaaatgggcaaccggtttatgcttcggcactccagcttcgggaagcgttacgcttaagaaaacagcaacatattgctgactgtctggcgattcctcagccaaatgaagacggcgaccgcatggattggtattcccctatatcaggcaaggttacctcctggattgcggccagccatagccagcgcacttcggccataaagcaactggaaatgtgccaggccacggtggcggcgattagccaacgcgctcagcaggcggaaaaaaccggtcataagctattcggcgcgctgttggcaaaagccttccaatttcccgatcagaatcacgtttatttggtagatgacaaaccagtcattaccttctggggtttcgtcaatctggataaaaaatcccgatccgacgctctggattgcctgcgtgccacggtgcatgagccagccgttgagatgatgccagcggctgcgccggttagcccgaaaacagcgtctgccgcgaccataccgccgacgatccccgagccggtgattgccccgccgccaccgccagtagcagaaaaccagccggtgccgccaaaccgctggcgtcgcctgcgtttatggctattgttaccggccgccgccgtgattgcggttttagcgctgcaactgtcagcgaccaagcctgcccccgtagctaagcctgcagtcagcccaaccgtgaccaaaccggccactaaaccggtagaacatcctgcttcaaaacatccagcttcggcagctaaacccgcgcctatcgtggccgccgcccaaccagcggcagacaaacctgcggcagaagtcgaaaaacccgcgccgacaaagacctcagaagcgcggctgccaaacccattgccggtgactcatgcgacagtgatcgctccagtcgtacctgagccacctgtggctgccgcagtagaaaccgttgccgtgccgattccgaaagatgcgttggtattgccagcggacgcggtaaaaatcggctccaccaagtttctgaatggccgctggcgtgtatttgtggatatcaaagatccactgacgggcaaaccaccggtactgaaataccagataaatgatggcaaaggcaccgcccgcatcacctatggtgacaacatcagttgccgggtcaatgttaatgccggtctgatgcaatctggcaatctggtgatcaatagtcgtaccaaggcccgctgtagcgatggttcccgttaccaggttcccgaactggtgtgcaaacaaggcctgaccggccccgctgaatgtaccggccgctatgacgctgaaacccttcttccaatgacgatgaaacgtgagagtaaataaacactatgctggcaacgatcacggattataaacaacgaattacgctgattcagaacagcgggattcaatttttggactttgccttaacgcccgtcgtggatgccgatttgccccatgcctttgtgcgtaaaagcgccaatggcccattattgcgtttgatgtttaatcaagaacgtggcaaatacctgttaccggtggcgggttcagcgcctgaagtggtgaaacctgaattcagtttcccgctggatcagtcacttaagttgctggagaacatctggctgcctttacctttcttacgctttaatccgccgcgtaactttatcggtggcccggataactgggcgcggatgcagattttagcgttggaaaccccggatcaggacggcaatactcaccgtgtctgtttggcgtttgataccaaggtttatcctgaaggtcacgataacgaattcctggcgcccaccgagcatgatattgataccggcacgcattttgcgctggcatatcaaaatgatgaattaggtgaatttctcgatctgacctgggtagacggctggctgcgggaaacttttattcaacaggttagccagcaggaacaacgtaccgagcgcgaaattaaggcctcgctgcgggaatttgaatatcaggcgcactatctcaacctgctggatatgttaggtaagcaattaggcataccggacatcaaaatgaccaccgccacgctgcaagagcccgcggtgaacgtggatctgattctggacgtagggaattcccacacgtgcggcgttctggtggaagatcacggcgacggaatcaacgggttgcagcagtcttacgagctacaactgcgggatctcggccagccacattttttgtataatgaactgtttgaaagccgcgtcgaattttctcaagcggccttcggcaagcagaatttctcggtggaaagtggccgggacgacgcctttgtctggccgtcgatcgcgcgcgtaggccgcgaagccagccgaatggcgctgctgcgtcagggtaccgaaggtgcaaccggtatttccagcccgcgccgctacttatgggatgaagagagtttcactcctggctggcgttttagccgtaccgccaccaaatctcacggagaagcgccggcgatcgccctaccgttgaccaatctgatcaatgacgaaggccagccactctacgctttgccgttggaagaacgtctaccggtattttcccctcattacagtcgcagcgccttgatgactttcatgttgtcggaactgttggcgcaagcgttaatgcaaattaacagcccagcgcagcggcagaaaatgaaccatgccaccgcaccgcgccaattgcgtaatattattctgacgctgccgtcggccatgccgaaaccggagcgcgaaatattccgtcgccggatgcatgaagccattgggctcatctggaaagcgctgggctggcatccgatggacgatgatttcacccgcgctgaagataaagccaaaagccgcgtacctgtgccagacgttcacatggaatgggatgaagccacctgcggacagatggtttatctgtataacgaaactcaggtgaatttcggtggccgcaccgaagccttcttcgccagtatggcgcgtccggataaacagctcgccgcagatgaaacagcagggaaaagtctgcgtattgcgtcgatcgatatcggcggcggcaccaccgatctggcgattactcaatacgttttagatgatggcgttggcagcaacgtaaaaatcaccccgcgcctgctgttccgagaaggatttaaagtcgccggcgacgatattttgctggatgtgattcagctttatgtcttgccagcggtgcaggccgcgctgaaaaaatccggtgtgcctgctcctgacctgctgatgactaaattattcggcaatgatggccgcgccgatgggcaatcgacactgcgtcagcaagtgactttgcagctatttatgccgctggggcgcgccattttacaggcatatgaaggtttcgatccgttagacagcagcgccgagatcgacgctagctttagcgaattgctgattcaggctcccaccgcgcgcgtgctggactatctgaataccgaagtgcagcgtgagctgcgcgccgatgctgagccttttgatattcttcaggttgcgctgatcgttaaactcagcaaactgcacgccgagtttctttccaaccgaatgaacctgacccaaagcctgcgttcgctgtgtgaagtggtgtcgctatacgattgcgacgttttgctgctgaccggccgtccttcccgcttccccggtatcgccgcgctattccgccatttacagccgttgccaacgaaccggattttgtcgctggatggttatcacaccagtgaatggtatccgtttaacaaactgggtcgcattgataatccgaaatccactgccgccgtcggtgccatgctgtgcctattggcgctggatctgcgtctgccgggcttctattttaaagccggtgattttcagccttattccaccgtgcgttatcttggtatgttggacagcaataacaccctaagtacggataatctgtattacagcgatatcgatttggattcaccgtcctaccagttaccggcgaaaggcagtttccccgtgcgcggcgcgctgtgtctggggttccgtcagttggataacgaacgctggcccgcttcgccactctatactctgtcgattactgatacagaattagcgcgaaaagtggctggcgacggagatctgcgggtaagactcgcgctggtgaaaggtgtgcaggataacagtccggaacgattcgaaattgccgaagcgttactcggagacggcagccgcgtgccgctgcaacatttacgactgaaattgaatactctggccggtaatggcaccggcgagacgcattactggatcgacagtgggagcgtatttaaaaaatgaaatctttaacacccgaacagctgtcggccacgctcacccatcagttacaggcggttgtgcaaggcattgatcacagttttggctggattgaaagctgtcgccagcaggctccacgtctggataccgaagctgagcggctaaaaatcaaactgcgccgccataggagtgaggctcagcgtttgtcagttatttcttctgaagcaatgaccatcgggttttttggtcagtctcagcaggggaaatccgcgttgattaccgcgctgaccactaacggcgacaataagctggaaacccgcttaggggataaaacctatgattatctgatgcatatcaatccggataatcaggctaccgcattggcaacccgtttcacccgccagaatgtgccagaagatcgcgcttatccggtacggctctctttgctcaatgaaaccgatttagccaagatgacggccaacatcttcctgcatgattttttacaggaaaaggcactttaccagcctgatgcccactctatcaccgaacatctcaacttattggcgatgcatcgccaaagtcaggccgtgagcggtatcacggaagatgatgtggtgacgctgtgggattatttgctgcgtcaggataaaaacagccagtccctactgaatacgcatttctggcccacggctatcgaactggcgccctgcctgagcgtagacgatcgcgcgcgtttgttctcgctgttatggggcgaaatcccagcgttaacggcagcttatcgtcactttgcgcatactttacagcatcttaacggcgccactgtggtattggcacctttgagcgtattagttgatgacctacagttaccggcgaacggcctgatgaatatgaccacgctggccaacctgaatgcgccgtcggatatttcggttcaggttaggccgctctgtcagggggaaaaacaacgggaagtgacattgtcactatctgagctcacgctactgagcgccgagctatgcatcccgctacactccgccccgcgcgatccggcttttgccaccgttgatatgctagatctgcccaactggggagcccagcttgatacgcctatgttaagcgaatccgaaaatttgccgcgttacccgttggcacagaattttttgcgcgccaaatgtgaatatttgctggatcgctataccgaccatcaggctattaacctgctgatgttatgcagtgccgcgggtcaacgttctgaggtgaaaaaagtcgccaaggcattggattactgggtaaaaaaaaactcagggagaaaatgcgcaggtgcgtgcacgtcgtcatccggggctaatttgggcgctcactcctttcgatcaacgcgtcactcatggccagcattatgacgaagcggtacagcgtcaggttggcaatcccggtgatagctggggctcggtgcaagcgctggatgaacgcggtaccgaacgaatggcgacctatttaatcggagaaatcgcccgaaatattaaaggcgagcgcctgacggagcaactgcatgaattgcaacgggagttgcaggataatctgctcggccactggtatcactccgaaggtgtcagcgatccgcagaaaagacagcgcattgccgaaactttgattaaaaccctgcaaactcgtaccggcgttcacggtgaactgctggagcgtttattacctgccagagaggaactgctgcggttattcctgcaacaatctcacagggttaccaaacaaccgcgagccgatcaaaagatagcccaaaccagtagcgaacccttcagtgtggggattgaaatcgatttatttagcgaattacaggaagatgtcgacacaaacctcgacgttaccccatcattcacgacaaataacgacttcagctatgccaaagaggtataccgctattggatcaaccatctgcgtagtttgccagaaaatggcccattagtggctctgctgggcgtgtcgaagccgacgattgaaatgctgatggaagaactgattaccgccagtattcgtctggatatggaaggtgccctacagcgcaaactggccgatcaggaactgccaggtacaccgcgggaacagttggcagatcaacaagtttcgcgtgcgttaaccgtgctgggtgattttgtcgcctggttgggattcctgcaaattgaaccggcgcagcgtccagacagccggattaatcgcgggcataagatttttgctcagccagaaaaaccggtagcaaactggggcacatcccaacgtttgactcgtttggctctaacgccaaccaataccaccgcgttttatatttatgactggctggttggcctcaatgaactgattatgcaaaacctcggttactcggccggaaaagaattgagcgtggcgcagcgcgatcggttgggtgcgatattgcagttgattaaacctatggcactgtagccagaaaaaggtgcctgcgggttattaaccgtccggttatttttgtctgcgctttcccccttccgcttgcggccttgaatatcagtggccgcaggcggaatatctgtcatcaaccgccaacggctacctttttttccccaggctttttatctcgctgaatgctgttttttaatcagcttaaagccagacaaactttccagcatattttcaatctccggccattccccgtagcccgccgccgtatgaaaatggccaccgcctgattttatcaccctctcactgccccactgactggcaaactgctgcgcgcgatccagcgagagatattcgtcattatcactgcaaatcagcgtgctggggaacggcaacggttttgacggaatggggcgctgcacctgaatagccgccggtgccgtaatggcatccacatcggccggagcgaccaataatgcgccaatcactttgccggaatggtaacgctctgcccactgagtcacggtaatggcaccgcaactgtggcctaccagaaaaatattaccgggaataccgtcgatagcgcgagccagcctctcccgccacgtgtcacgatccggattatcccactctttctgttcaactcgcactgcattgatatatttgcgttcgataaatgactgccagtgttcggggccggaattggtataaccgggaaccagcataaaggtacattgaatcatgggatatcctgcaatcagaaataaaacagatattgagtctcgattataatggaacagtttttagcaacggcgagttcagcatcgctaccggggaaattaccggtgcgtccagcggcacatttttgccgtagcgctctttgattttttgctgcacggccggtgcggtcagattaaactctctcaccttttgcaattgaccaatttctagcccggtggctcgttgatacattttccacaccagttcggaacaatacatccgttcattagaccaatcaaaagtcagatcgtaaggcttgttttggaaggcttttccttgctcatgcagctgcctgacctgcgctgcggtcaatggcgtctttaaccgtttcaccagatactgcccgcgggcaccgcgtttgatccagcgatccagcggtgtgtatcgcaccgtggcaaccgcttcataaacatagggttttccctgcttaaacaacactattcccatatggctatagcgggaaccggtagcaaactgaatggcctgactttgggatgaagtagacgaatggaagataatgtcgccttcctgcggctgataggcaaaagccagcgcgctgaaaaaacagcccaataggacaaacgccaactttatcatcgagatatatccctatcaatgtcgctattaatcacagctgacatcctaacatccttccgtggcagatatatccatgaatttttggtaataaaaagggaactgacgttatttacaacaggtcagttccctcacacagccatcatttatagactaggcagcgttaattatgccgccgccgctgcttcactcaccaactgctgtagctgcgaccataatgcttctacatggcggcgctcagtgcccaaagtgccaatggaaattctgaccatccaacgcccgcctaaagttgccgtagtcacataagcattgcccgactgattcaaggtttccgcccaagaacgggtgtaggcatccagcgcttctccttgtaaacccttcggttcatgccgcacgcacagcgtttgcaaattcagcggagccacaagcttccaatcctcatgttccgccatttgctctgctaaccagcgggcattatcgatatcgcgacgcaaccgcgcctgtagcccttcaacgccctgctcacggattaaaaaccacagtttgagcgcccggaaacggcgtcccagcggaatcccccagtcacgataattacgtacttgaccgtcagccgtcgactgtaagaagctcgggttggtgctcataatacgaatcaaatgctccgaatcacgtacacaataaaccgaacaatcaaaggcagctccgagccatttatgcggattcagcaccaccgaatcggctttttcgatcccaagccataagtgacggaattccggcaaaatcatcgcggaacccgccattgccgaatcgacatgcatccacagcccgtacttctggcttatatcaccgatagcatccagcggatccatcgccgtggccgccgtggttccggtggtagcaatcacgatacaaggacggtttccagcggccagatcctgctgtatcgctttatccagtgcgtggggagacagggcgttgtgctcatccgtggcgactaacctgatgttatttaagccaaatcccgccagcatcgccgctttgttcacgccgctatgggcttcctgcgaggtatacacaataagcggcgcggcgctattttgcatgccgtcctgcatcaatgcgtagtcggaagtccgttcccgtgcgctgattaatgccaccaatgtcgcagtcgatgcggaatcctgaatgacgccactccatgcatcactcagaccaatcatttttagcagccagttggtcgtgacttcctcaatttccgtcaatgccgggctggattgccaagataggccaattacgcctagcccggtactcaggcaatcacctaataccgatgacagctcaacgttggaggggaaataaccgaaaaagtgaggatgctgccaatgcaataaaccgggcatcactagcgattccacatccgccataatgtgttcaaaggattcgcctttctccggcgcggtcattggcagattggctttaatctcacccggcagcgtattcggatgcaccggccgctgctcaatattctggcgataatcagcaattaaatcgatcatggcgtgaccatgccgacgaaattcatcaggagtcataatttattatcctaaaaggaaaaagttaatgccgcttagcaccagaaatagaatggttcattggtgttatagccgataaatgactgcatgctgatgcgtttgcccgaatcaaacccgcaaattgcatgtggtcgacgcgtattaataatcaccagttcattcttttgcggctgaattcgcagcgggaattgcagacgttcctctggtaattgatcgccctcaaacagttcgacctcatcaaatgaaaacgcctccgtgtcccataccattaattctcccccggacggtggagtttcaatataaatattggcgctaaactgatgttctaattcggctatggagaatggtaggcaatccacgtggggaaccgtttcggatagatgagccgtctccgggaacatggcgcggataatcccggcaaacatcggttttccctcaaaagatgcggtaaccgctccgtctggccaatgttgttggaaatggtcaatcaatgcctgcaccggtggttttgctggcgcgcaaatattatcgatcagttcacgcatcttggctgcatcggcataatatttctctttggcaccgtcgccatcaggcttgccgtaggtcatattgaacggcgtcccccagcgatgcacgccgtagaaattctgcacaacctgaccatcttcataagtttcatgggtgtactggtgcagttttgccgttttatcgatgtaatcattcagcgatgaggcagtttcttccgtacagtagttagggattcttatggcaagaatttcgccactgattaacttttccagactgcgttggtcaagttgttctaaggtcacaattttggattggctagccgttgtggtctggttggtgatgtcttgtaggttagacatgatgatgatactactccgttagtttatattcactcatcaaaaccctttaaatacaaaggattacattatcatcactgcatttttgagaggatgcgccaacctgaggcaatggcttcattcagcgttccctcgctaataaccaaagatgataatagttatctttaccaataaataatcgcctgtatataacaaaattaatttattttatgaatattttgatttttttcgtataaagctatttgtctatagtcctgacctgataaaaaaccaacaaatactgattatttatccacctaaaggcccacttgagggaaaaatcggggagattgaaacagatgttgaatgaagtggttaaaaataaaatctattaatttcaatgataaatagattttttatatgcgtatagcccaatgatttgatgacgagatagagtgaaccttgccaaaattggcaacgctctaccctattgactctgcggttgtttacagattaaagactttaggcgaggagtaaatgctgcaactcagttaaagaactgacctgatagcgcggttgaattccttctggacgcgcatgcccctgagtatttaaccagcaagtatcaatacctgcgttaattccgccctgaatatctgaatgcggattatcgcctaccatcaagatttgctctttgggcggatttgccatcagattgaacgcatactcgaaaattcctacgtccggcttggctacccctacttcttcggaaataaccagcggcgagaacacgttcttcaaaccggtgcgttccaaacgaacattctgtaagtcagtaaagccgttggtaataatccccaattgagctttaccatgcagcgcattaattaattcctgcgcgccgggaagcagagcgcaaatatccgccatcgcgaccagaaactcactgtttagcgtatggggcgatacgcccaacctgttcgcccacatttcaaaacgagtgctttgcaactgtgcggcattaattttcccgttttgataatccacccacaatggctgattaaccaattgataatgctcataatcctgtagcgtaaattcagttttgaagcgggaaaacatcagttttaacccttggtaagcatcaaaatgaaatagcgtttcgtccgcatcaaaaagtatccacttgtacttcattctttctacgactcctgcggttaatacgccacttgggttcctgattttatcttagccggctattctccggtagtttgtctgtatgagcaaccttacaacgccatacatcgtgcaaaatatcagatcaataaaagcctgattcggctttctgaccggatatttactcggctacgccgctaaagagcgcagtatggtacggttgatttttactgggcgattgccttcggttaatggcaaattgaaaaccgagtgcgttttttcattcagcgtagacaaggcttcatccaatgggagtgccatatcttccgcaatatcgataagttcatctctggaccacagcagccgaccaattaataaacgtaatagcgccgaatgatcggcatctaatccaaaaatttccaccggttttacccaggtggccatgggctgaataggcttagatttttgttctacagtagcgggaaacatcgttgatagcactttatacagttcgcgactttcctgctgcaattgcgccactctggcattatcgttaatcattttagccgtggtctgagtcacgctaaccggcggtgattgatgcaggtcggtatagaccaatttactgtccagtgataaccgcacataaacccgctccagaaatttcacttcctgcggggtaactttgccatcggcctgaaccaggtgggccaaaaacgcggcaatagcccgtcgggttgtgacactgagcggctccatttttttacgtaacgcgcccaaggtgctggttttctttattcccggctgtaaatacgcttttaagcgcatacgttgaccggggctgatatgcccccaggcatcgacatgttggctgagcatcattaattctggctcagaaatcccgccgtctaccattaccgccgcgcaggccagatcgagcgttaccaccgttacccgataagccgggagcgtttctgattccgttgctagcaccgtgataggaaacagtgcaatcgtatcctgtgccgacggagtaatattatcggataaaatatcaggttcgaccccaagctgtattttctccatagctcggactaacgccatgactttattacgcgtcacctctccggggctatttaagcgggtaaatagttcgttgtaggtcatgagcagtaacccgtatcccacccgctctttgatattgtccaattcttgctttaacgcttctggccacagcgtcattggcagtagcaaaatagcttccagatcgttaattttatcgggattgagcgcaataaactggctgtaaccggctaactcggtgtaacaatcctccagaatcagccttagtttctctctgctatctttagccacgaccacatcaggcaaatcatgaatacgccgggtaaactgttgatccatcagccctgcggaagccgaacggtagcaaatctgtagtttggttttattcataggcagtatgaaaccttgcgggaaatactgtctatatcgctgttggaacagctgcgagaaaacgccaaaattgcgcgtagcggcaatattatgcggcaagttaggatcagataatgcccaggctacggcccaatccgccggtaatggatgctggtcaacggctaactgccctaaaccgattcgtaaacctaatggtaaatctgtcccgtagctgccaatcggcggcgaagaaagataagttttttccgtgggatcgagaggtgtgagataaaccaataagttacgtgcacaacgttcgaattcacgatgctcgccataaattccgagtaaacggataatttccgcttttaacgccggttgctcatttttggctgcaacgtctacgtttgcgtcaatcaataagcgatgttctaatccatagaagaacaggaaaacgtagccaatataagcttcaggagcctgacgcccttctgccagccattgcaaataagcgcggcgagcctctggcgatatcatggagtagttaggacgttcatcagtcagcggcaaagacatatcaacatgatcggcggccactttcagcgttgggttaataaacgcaggctctgcgccactgcgattacttttcaatttattcccgatgtagatcatgccatccggtaaattaattccggccaccacggccagttccccaggaggcagccaagaggctcgcgatagtgagccttgaggtagcactgaagcctgataattttgtttattcagctcatctgccagcctgaaaatataaaactcatcgtccgattgcagcgggagcgtcgccgagatgtccctctcgtcggaaggtatatcggaaagcaaaggcgaaggttcagttgccagttcgagcttcggcttagagacacgctttgcggctttcaaataatgccaaaagaagaaaatgcataatagtgcagcaccaacggctattgatgtttcttttggcagcagtgatagcaaagccaaaagaaacattaacagtatgacccagccagttgtggcagattttatcttagtcacgatggtttataagcccctatcttgaaataataatttttatgctgcccttaagggcaatttcttaataataattctatttttataaagtacgcattgcagatagccgaaatctccccgagttaatacaggtgaaatcaactcagcagattatcaatataagtaatttataataaagcctcccgatagcgggaaaaacaattatgccagcagacgctagtttgagcacgctgtttgtaaggaataatgccagggcgctaacaatataagtggctaaaaagtaggtagcagttgccagaacagcctgagtgtatccctatcacacataaaatgctgaatgattgctattttcaaacagaagaatctcggttaatctctcggaattaactttctgttttaacggatattttattctgatgggaaaaatctcatctcaatgaataaatgccctgcaaacatactggttgcaatacaaggatgacggtgacaaacagaattaactggcttgatacgccctcgcgttttggtttaatcagtcggacacttcattggttgatggctttgttatttttatggcaatttttcagcgtgattgtctggcatactttcggacgcaccgcatttaccttgtggatggataaacagggttcccacgcaaccgtaggctttttgctatttatcctggtaataatacgtgctttatggcgtgggtttaatagacaccgttacccgctttcgaggccaaataaagcgaacaagatcgccattgttgggcatattacgctttatttattgatgtttgtgattccctttttggcccttctccgctgttatgctgatggcaaaggcgtggttgtcatgggcatccctgtgttgccagccacggggattgaaatcaaagggattaccgtttggatcgatatgatgcatgggccactagcatggctgctgctcttttgcattggcggtcatatcctgatggcaataattcacagttttatacgtcgggatgctaatctccgccccatgatttaagtagaggcatcgattcaggatcagggtggagcttttctattacaccctcagcaatgtggcagaataacatttgaacaaggaaccgaacgacatgatacctaagacgaaattgaggaaaaaccttccctacgttttgatcggactcaatttactttttacggcgcaggttcatgctgaaattgacgatcggcgcgtgattgccgactgcaaaaaaattccttcttacgctaatgcaggaaataccgcctatcaaaaaggtgattacgttacagcgcaaaagcattttatgaatcaggttgcctggacagaagcctgccacttctctgacgaggtaaaagtagatagcggcgcccgagctacggcttataacaatatggcgctaacctatattcgtcagggagatctgcttaaagcaaaagcctggttaatgattgctccagaagataaaaaatcgcaatataacctgaagcttatcgctgataaaatagccgcattacctaaaccgacaacttatgctggtgaatattggcaatattcaggactgggtaattggaactccattgaagtcacgccaaaaggtaataaattcaccatagattacaatggttactattttggtattatgggcatctactatggccctaatatggggcaattctcttttgttagcagtattccagctgatggcaaggtagaatacgaccagagtaaagcagataaagaaactgattattccggtgactgcaaagttaatatgcaatttactcatgcggatgtgactgtagaaactgcgggtgactgcggatttggtcataacgttagcgctgatggcaattatattcgcgtcagataatcactgtttattagatcaggcaatcggtatggttgcctgcattattctattctcattcctctattccccagcaacacctcatcttataacgtaatgaccgagtaaatgtaggtatttataacgaaagctggcctatttacctatgaactaaataaatttaatatacttaatgtttttaaagcaaaaataagcaacataattatttatttaatactaaataattaacaattaatttaaaatagtgatcttgatcacgttttatttgataaatatagatagtatgaattttgagcacatcagtgcttgtctatttaaactgcaaaggagtgttaatatgggatatatggtttcgtttaatgctaatccagtaaatgcgtcagaagagagccattcacctcaggaagttcatttgactcactctgagaccgaagctcttaaggatgacgagtaaatataagtagtcattaacatactgacaactaagttatttgtctcttattttaatgactaaaaacattaagcgccgatagtggcctcatcggcgcttaaataactccctttccattaatagtatcatttaaccgaaaattccccacatgactgcttgctattccagggaggaattcctatgcgtcctattgagcgcgatttcacattatccgatgcaaaagatcgcgttatcaaagaaattgataatctgggtttgatgtggcgtaaagaagtttacggaaagaatattctgacgattgttgttacgttaaaacatccaaagaataacaatcaaacgatgggcgtaggtaaaggagattatgacaatgcttttgttggggcattatttgaagcactggagcattatattgaggatttttcctctcctctagccacagtacggcctgcaaagactctgatgcgtaagggaatactagctagtgacgatgtgctggatatgattagcactcaacctgatagtcatctggctacgcgccgcttcgcctctaccgcgggagatttttattatccattagcgctttgcgatcccaattattcccgtaaacctcttgccgatgataattttgactatcgttatctcgctcgctatggaagcaatagcggcattgctattggcgcaaaccgaaacgaagctttattacatggcataaatgaatgtatagaaagggatgcattatctttgtttcttatccagggtttatacagccgaagcccatgtacaatatatgaaattgataagcagagtttaccggaagacgtcgcacgcagctggcaaaattcagaagaggaaattcaacaaaggatacgagtactggatattactcagggactgaaatgtcgtacttatctggcgttagctgaaaaatcaaaactaataaaatatccaataggctgcggaacatcgctacatccgcaccacgcattgcagcgagcgttaagtgaattggtacaaatcaatgcggtatttaatcatagccaagagattcaacgagagaacgaagtattgcatcagcggttattaagatacaaaaaattagagcgttgtttttgcatgcgaaccgcggatatttttaacaccaatgaagtcttactgtgtcgcctgccagtttcagaccacgcagacagtcgccccgccgaagatcttgtcgagatagaacaggatttaattgaacaagggtttgttatcgggaagagtattctctatgaaacttctcaggtgtgtctaaccaatgttttaattcctagctttgaacgcttttatattattaccagcgggaatattgttttacctctgttaagaggaaggaggtctcttgaaaaaaaaactatctaaagatgattttgccgtcaggtggttaatcagagaacatcaatatattaaacaccagaaacagataggggatattcccgaaggcaatatagtgaccttaaccgaagaggttgaccttagcatggggagttatttcctggcacatgcggaagaggaatcctggctggggcgaaaatttatatgtgaaaatgaattaggtcgacaaagctggcccagcgtattaagcgatattaatttattaggtccgttcaattctgccagacgggaaggaaaccatgtcacgttcagttatattgccccctcttctcgccggcgctctagttttttccaaagcctattaaccgaccctatgggcgaaattgatttttgttttattcgcgattttgacggcgcacttccctctggcgataaattttggcaagttgaccacctttctgctgagagaatggctagggaagaacgccattttcagatgcacacagaactcagccttaaggtgttaaaaacccagggtgttatttacgatcccgcctgttctaccggtgattttctggcatccctggctaataaacttcctgagtttaattatattggttcagatatttctcctcagatgatcgaatttgctcgtgagagacataaggaacggcctatttctttttccgttggcgacgccatgtcttcccggcaacgctgcgatattcttattctgcgctttctgaatgatgaagtgatgcaaataggtagcgcggcgctcgcttttaatcatttgatcggcctattgaatcccggcgggatagcatttgtttttggtcatactcccgtattggttcccatcacagacctggcctcggcgcttggatttgaggtaataaagaatacggccagctcactggatcagtgccacatatttcagttttatatgttgagaaaatacccatgacgcaagtgcgtagctcaggtttcttcccggttgatgatctgcactccatatattgggagcggcatggaaatccgcagggcgaaccttggatcgttctccacggagggcctgcggggcaaagtcatcttattcatacggcattttttgatttgtcactgtgcgacgttttaatttttgatcaacgaggttgcggccaatctcttccttacggcgagcgaagaatcaataccatcaaccatctggtggaagatattgagaggcttcgatgttttttaaaaatgccgcgtgccaatattttaggtctctcctggggctgttggttaggcattttatacaaaattcgctatggcatgagcggtttgaaactggtaatcggttgcccttttattcctattgcgactgtgcaggagctgcattggttttatttccatcagcagatctgccagacgcataggctaaaaccttttatttttgctgaaaaccaacctaaatcggccacctactatcgctgtttacagattttggccacgggcctagccagtcagaagagatctatggctcaactttgggtgaataccgatgaaatcgcgacaaatgcgcaccaggatttccatcagacaatcacgttaaccgatgaatttttcaatccgcgaacttattccgccatcatgctagaaattcattaccatgccgccggattttttattaccaacgatatattgcgacaagttgcgcaaatggacgctcagggtgtcactctcgtttgtggtgaaaaagaccgaatgggtatggttgcaaccaactggttagccgaacgggttaacgttgaggtaatactcgtgcgggatatcgctcatcaggcgcttcatacagaaatgattaaacaactccggcatcttattgcccgatagacatcgcgctataggcagagagtcaacgataaaaatccccgcagccaacgcaaacggggagtatattatttccaataaaatcaattattacttcaacgccattacttcaacgccattacttcaacgccattgcatcacgcatggtaaagaacaggtcggtttggtcagttagacccacgacgttagccgcgtgagggccataggcagcaatgcgtagctgcgtgccggtatgaccttgagagtcatcttcggaattcccataactgatcgccatcaccgcgccatctttggtcattaatgcctgcgtcaaccccggcgccttggcatcggcctcgacgatctggctggaatgagcatggtcggcggtcacaatcaccagcgtgttgccgtcggcttttgcgaactcgagcgctttttgtaccgcttcatccaaatcaacagtttcaccgaactgaccacaagggttcgcggcatgatcctgtttatcaattgacgccccttctacctgtaggaagaaacctttttcattggttttcaacacttctatggctttttctgtcatggcggccaacgttggaatatccgcagtgcgttccggattcacctcgcaggtgactggagatttatcgatattaccgtggtatgacgccttcgggcctaaccaacgcactggcatattacccgccgagaataggccaagaacgggtttatcctgatttgcctgagttaccccattgagatcattcagactctcaacaatcagataaccgcgggcaatagcctggtcgcgcaaggatttatccttccactcgccggccttagccagttgctcaaaagattttgctccgccgcctagcgtgatatctgcccgggcttggatcatttgctcggttatcgaacctcttccgccgttttccagcgcattggtcgcgcatttttcgctagtttcttcagggccatagcatttgcgaccggtaacgtgagcaaactgagcggcaggcgtggcatcttgcaactctgcggtagaaacgttgccagtggctttccctgccgctttcgccagttccagaatggtgatgtgatctttgcctgtaacatccacacccaacgcgccgttataagttttaacgccgcttgaccatgcggtggctgacgcagcggaatcagttacataattcggtttttgcgtctttttgtctaaagagtaatgcgtgtattgacccgtcagtggcaaggcatcaatgcctttgaagaaaccgccggcacccgccgcatagttacgcgccgaggtgatttcagaatcgcccattccatcgccaatcagcaaaatgacattttttacggttttatccgataaagagtcgcgtaaagcctgcgtctggtcactatctaatcgacgagctccgccgaactgagtgatgtcgcctttcgcggaacggtcatataagcccgtttctgcggcactggcgttaggcatcagtaatgtgcaactggtagacagcaacagcgttgataatgcgactcgggaagcggtagaaatgcgctttgacatcggtagagttccttttgtaacacactaatacagtttgtatttattggttacattggatactagagcagccggatgacgtttttatgacggcttatgttaattatttcaccctcatttttaatcaaactactttaaaaaacatcggctcaattttactaacagaaagcggcattttgccgctctggcatgctttcccatgttccctatttaccgacatccctgcctcactgaaacatcaccatatttatcaaaaagttaaaccagtaagggcagaatttagcgagtaggaaagtattcactccgcggagtacgagttactcggtgtccatcggtctcactgactgatagatatcaatatcgaaataaccgtcggccattccgtcattcaaatagacctcaaaacacgcaccttctgccgggaggtagccactggcgggtaaatgcaggttatacaactctccccatgccttggcataatccccatcggtcacccgcgcacgataaaccgcataagtcccaccaggtattatttgtaaaagcacaccactgctggcatgcgcgggcaagacaaaatcatcggccacagaaaaagccacatcagcccgcagattggcgggtggcgtggtttcagggttatcccaataaagcgctagccaggattcatagggtaacgggtgctgctgctgccaggatgataactgtttgaaaccaagaggaatggtttcggcgtaagggccaatcacccgaatactgacaacttgctgcggctgtttttcaataatgcgaaatgtcatcgtagcggcctctcaagataagatttaggaagatctctcttctcacgaacggtttcaaatacgatactgagcctgattgaacgtgagtaaatatcaatgcgtcgtggtactgtataaataaacagtaccacgatattatctgaatatcgctcatttatacagcgttaattgcgctatttttgttctatttcgcgccaattgcctcatcaggcaagcgctcgccagcacgttgttggttggcggttgtttattttggaccgatttcacccaattgactcttccttaattcgcgaccaactcgccgcacaatcagcaacggtcactaaattgttgccacagttgcgttagaatacgcgacaatttttctgcccattgctgttgtccaaaggatggcataaggttcgttgaccccgacctgtaaatcgccttctgcacgtaataattcaaccagcaataaagcccattccggattgcggttaaacagcgtaccgatctgccaaggtctggccacacctttaaaagttggcgtaaaactatgcatagaaatgataacgctaggttgcccttgggctgcgcgtcgatccagcgtttggcgaataagatcgtggtaaggctggaaaatttcggttctgcgggcttctgcctgcgcgggggtgacactttgattgcctggaatcgtggtttgctcggaaatttcagggatagaactggcgataccgggagtacggttacagtcgatgaccaggcgagaataacgctgatggattaaggtggcatccagcagctcactgagccgttgagctacgggtaaagagccgatatcccagccaatatgtcgatctatttcgccgggcggtaggcctaaatcacctaatcgcgaggggatagtttgcccggcatggtcagccaggaaaatgaaaggagagactgcacaagcgcgttctagcacggccggcgagcaatcctcagcggttaataagggctgcgggcggtcaactgacatctttctgactccgatagattaggcaaaacctcatcctagtcgctatttaaggctatgcccagtcacggctgataacctggcataatcagtttgaaggataaagactaacgctttgtagttaatcagtgcgaaccacttcgcattgtcaatgataggcggcataaaactgacagaggctattcaaaaacgccggtttttcgtgccatactgctgttgataaaaccagtagataacccccacggagccttatggaaaccttttacattgaccgtactgacaccccagcaggtgaactggtcattattggcgatagcgaacataacctgcgcgccattgattgggtcgatcactatgaaagactgctgaaattactgacgtctcactatgggccaaatacttttacgctgactgaaaagattaatcctggcggtttaaccgagaaaatgcagcgttactttgccggtgagctggatattatcgatggcctgccggtaaaaactgcggggacggcgtttcaacggcaagtgtggcaagagttgcgcaacattccctgcgggaaaaccatatcctacggcgaattggctcaacgaattggtcgccctactgcttcccgcgccgtgggcatggctaatggcctgaacccagtctccattgtggtgccctgtcatcgcgtcatcggcgcgtccggctcgctgaccggctacgccggtggcgtagagcggaaacgttggttattggctcatgaaggttatcttttagcgcgctaagcattgttactcttatcagacgccttaaaagatgttaaaattgacaaatatcaatattaatgggaataccctcatgatcccggaaaaacgtgttatccgacgtatccagtcaggtggttgcgcaattcattgtcaggattgcagcatcagccaactctgtattccttttaccttaaatgagcacgagctggatcagctcgacaacatcattgaaaggaaaaagcctattcagaaaggacaggcgttgttcaaagctggcgatgagctgaagtctttgtatgctattcgttccgggaccattaagagctataccattaccgaagaaggcgatgagcaaattaccggtttccatctggctggtgatttggttggtttcgatgcgatcagcaatttacaacacccgagttttgctcaggcgctggaaacttcgatggtctgtgagattccgttcgatacgctggatgatttatccggcaaaatgcctaacctgcgtcagcagatgatgcgtttgatgagcggtgaaatcaaaggcgatcaggatatgattctgttgctatcgaagaaaaacgcggaagagcgtctggccgcctttatctataacctgtcgcgccgttttgcccaacgtggtttctcacctcgtgagttccgcctgacgatgacgcgtggcgatatcggtaattatctggggctaacggttgaaaccattagccgcttgctgggccgcttccagaaaagtggaatcctcagcgtaaaaggcaaatacattaccattgaaaataccgaagcgctggcacagctcgcgggtaacccaaaaccggtgtgctaatctgacctaatgccagatcaataatttgcatatttattggtctggctctctatcccccctgttctgtttttccatcatggtttactctgtaagtaacacactgttaatagtgattcgcagttgtaaggagaccctatggcaaagtatcagaatattctggtggctattgaccccaatcaggacgatcaaccggcattgcgccgagctgtttatctggtgcagcgtaacggcgggcaaatcacagccttcctcgctatctacgatctttcttatgatatgaccaccctgctttcgccagatgaacgaacggcgatgcgtaaaggcgtgatcagtcaacgcgcagcctggattgccgaacagtgtcgtttctacgttgaagcgggcattcccattgatattaaagtggtttggcacaaccgaccctatgaagccataattcaggaagtcctgagtgcgaagcatgatttgctgttaaaaatggctcatcagcacgatcggctggaatctattatttttaccccaacagattggcacttattgcgtaaatgcccctgccctgtgtggatggtgaaagatcaaccttggcctgaagacggtacggctttggtggcggttaacctgtccagcgaagatccacttcacgatccgctcaacctcaaactggtacaagaaaccaaagagctggccgagcatgttaaccaaacggcggtgcatctcattagcgcctatccggtgacgccaatcaatattgccattgaactgcctgattttgatccgagcgtatataacgatgctattcgcggccagcatttgatagccatgaaagcgttgcggcaaaaatttggtttggacgagaaatacacccatgtggaaaaaggtctaccggaagaagtgattccggatctggctgagcacctacgcgctggcgtggtcgtactgggcacattggggcgaaccggtctttccgccgcttttatcggtaatacaaccgaacatgtgatcgaccatctgaaatgtgatttgctggcaatcaagccggatggatttacctgcccagtggagtgtaatgaggatggtgacggtctgtcatccaacggataacgaccactaagcttagcggcgataaatttagcgataacctcttcaataccaaagccagtctgtgaaaacggactggcttttgcttagtgagctaactcaaaacgatatcaaaacgataggttgtctgctccgcaccggtgccgataaatcaggcacatccggtgcgttccctacccttgaaaattcccttacagcagtgtaatagcaggtttttagccttagcctttggctgataaaaaggacgccagtcgctccagcgcctgcttgcatcgagtattcattcagctacaggaaggctttgtatggcagctctggctcatcgataaagatatcgtggaagcctcggttatgctgataatgcattttatgcttgtccgttggataggtgtactttccgccgacttgccagaagaacggcgcaaatttgtagtccaatcgatcttttttcattttccacagtacctcgatttcacgagtgtcactttggaagttagcccagatatcgtgatggaacggcaccactacctgcgcattcagagattcagcggcgcgcagaatatctgatgaagtcattttatccgttacaccgcgcgggttttcaccgtaggacaacagcgcgacgtcaatatcgtaatcgttaccgtgtttagcgtaataatttgagtagtgagagtcgccagaatggtagatcgtgccaccgctggtttttatcaggtagttcaccgcacgctcatccatggtatccagcagagccttatccttggaggatgtgccttttggtaatgtaatcagtgcagtacggtcaaaagagtccaacacggtgatttgaatatcgccaatatcaatcaccgatccaacttttgccacgatgcagcgttcttccgggacgccccagccaagccacagattaacgcaggcctgcgggccgataaatttcacatgatcgtcgcagttttgcagcaccgcggcagcgacgttgacgtcgatatgatcggcgtgatcgtgagtagccagcacggcatcaattttcttgatggcaaaagggtctaatacaaaaggcgaagtccgaagatttggctgtaatgcccgcacgccgcccatacgcatcatttgatgttgagcattcatataaggattagactgcgttcttttcccagtgccacaccaaaaatcgatagaaatgttggtatcaccggcggatttaagccagataccggtacatcctaaccaccacatggcgaaagtattgggttgaacctcggttttttcgatttcttcatttaaccaggttccccactcagggaaagtgttcaaaatccatgactcacgggtaatctcgtttactttgctcataatcagacctttaggataaagaaattagaccaaaatgacgtctaccccctgcgctttcaggctgctgataacctctggatttgcatccttgccggtaatcagaatatcgattttactggctgggcaaaacagtaaacccgtgcgctgccccactttggagctatcaacgaccaccaccagtttgctgattttgttcagcatctgctgttccgaaactgcggttaacatatcggttttatacagcccggtttcattgagcgccttgccacttgtaaacatccatttgcctgcataagcatcaaaagttgtcgaggtagggttaagaataatattttgcgttttgttgtattgacctccaataatgatcacgcactcgtggtcgttctcaatcagataacaagccagcgggaagtaattcgtcacgatttgtacgtcgcgcccgcacaaagtttgtcccagtaaaaatgcggtggaaccgcagttaagcactatgctgtcaccgtcctgacatagttccgatgccttggcggcaatgcgtgatttttcttcatagttatcggcgttattaatgttcagcggcgaccaggcctgcttctttttatccacgatgcactccgcaccgttgcgtacctttcttaactgtttcaatgcatccagcttggcgatgtcacgtcgtgccgtcgcgggtgaaatatcaaaacgctcaataagatcgttaatagtgagagaccgcttcgcatttacccaagccacgatttcatggtgacgttgcatttcattcatttcagtcatcctacgataaccgctcacatgctgattacatggtgattggttttgatttaaattgatcatatacgtgagaaaaataactgtcaatgtcataatattcaacaattgaatggctactctctcggtatacccttaatttctttatgcaagaaaggtcatttattacttatcacaatctatttatatgtttattttcaatgccttaaagtaattacataaccacgaagcccttattagtgtgagtaaaatcaaattaatcacattgaatcattgaatgatcacctttgattatatagcttgttgttgtgtcatgtattatccgagaaatggatctctacagggcggtggcaaagattccgtccaaccatattagtgtcagggggtggtatggagtatctgtatgatgtgttttatatcttctacagccaggtcatgaccaaagcgccgttgctgcttggtctggtgacttgtatcggctatagcctgctacgtcgtgatatcacaaccattattaaaggaacaatcaagactattgtcggttttatgctggtacaagtcggcgcaacaacgctggtatccagctttaaaccggtcatcgaaaaaatggccgaattccacggtctgacaggatcggttatcgatccctatacgtcaatgatgacaaccatggaaaccatgggcgacgattattcctgggtcgggtacgtggtattactggcgctggcaatcaatattctgctggtggtgctgcgtcgctacaccgggattcgcaccattatgctaaccggccacattatgttccaacaggctgggttgatcgcggttttctactttgtgatggcggttcctatgtgggaaaccgtgatttactcatcgattctcctcgccctttattggggtattttctccaatattatgtttaaaccgacggaagctgtgaccggcggcgcaggtttctctatcgggcaccaacagcaggccgcctcctggattgcggtaaaagttgcacctaaacttggcgatccgaaagataacgtagataatctgaagctgccgaagtggctgcatatattccatgacagcattgccgccactgctatcgttatgacgctgtttttcggcgtaattttactctctttcggcatggataacttgcgttcgatggcgggcagcactcactgggccatctatatcctggagaccggcctgaaattcgccgtagcaattcagattattgtgaccggtgtgcgtatgttcgtggccgagctgtctgaggcttttaaaggcatctctgaacgcgttattcccaatgcggtactggcgattgactgcgccgcgatctacgccttctcccctaacgcgatggtatttggttttatctggggcgctttagggcagttcactgccgtattggtgatgctggccttcaatacatccatcatgattattcccggttttattccgatgttcttctccaacgccactatcggcgtgtttgccaaccacttcggcggctggcgtgcggtcatgaaaatctgctttgtaatgggaattatcgaagtattaggatctgcctgggctattgatctgtttatgcagaatggcactaccttcaatagctggatgggtatggccgactggtctctgctattccctcctatcatgcaaggtttatctgcttcatccttaactttctacctgttgatcgcactggcgctggtttatatgttctttgcctcccgcactttacgggctgaagaagatgcagctaaagcgctggcggcactcccccctgcggtagatgaaaatccggccgaagaggcaaaacccgaacattctaccgatgcgcccagcgtcgaagccgctaaaccggttcggattctcgccgtctgcggcaacgggcaaggttcttctatgatgatgaaaatgaagatcggcagctatctagagaaaaaaggcattccccatcacatggattcctgcgcggtttctgactacaaatccaaactggctaataccgacattattgtttcgtcaaaacacttgtcgagtgaaatggaagttggagaaggtaaatttattcttggggtacaaaatatgctgaacccacattcttttggcgaacagttgcttgctctgattgagcaagttaaccaacaaaaataacctaaattttaattttgatgacacaccagagctaaccggggagatatcactatgaccacctcatcactgaaaagctcgttgatagaaaaccgctccatcatgttacaggcgcaggccgaagactggcgcgcggccatcaagctgggaaccgatatgctgattgcctcaggtgctgtgacgccggcctaccatcaggccattatcaacagcgttgaaaagctcggcccttatatcgttattgcaccaaattttgctctgcctcacgcccgaccggaagacggcgtaaatcgcacggcgtttgcgttagtgaccttaagcgaacctatttatttcgacggagaagacgacgcggtggatgtgctgatcaccctcgcaggcagcagttcggatgagcatatggcgggattaatggaggttactcaggttctggatgatgaaaacagcgaaaccggagtcgatctcgacaaactgcgccgctgccgtagcaccgaagatgtttatgcggtgattgatgcggcgctgcgggtgtgacaaggagaataaattatgtatcaagctttgaaacatcgggtgctggaagccaacttgctgttgcctcgctacggtttagtgacctttacttggggcaatgcttccgagattgatcgaaagcatggcgtcatggccattaagccctccggcgtggaatatgaccagatgaaagccgaggatatcgtggtgctggatctggagggcaaggtgatcgagggcgatttaaatccctcgagcgataccccgactcatcttgagttatatcgtctctttccggcgctgggtggcatcgtacatactcactcgcgctacgccactatttgggcgcaggcggggaaagatcttccggcgttgggaacgactcatgctgactatttttacggtgatattccctgcactcgtccactaaaagacagtgaaatcaatcagaattatgaaagaaacagcgggctggtgattgatgaaaccttcagaatgcgcggaatcgatccggtagccgtacccggcgtattgctctatgggcacgccccctttacctggggaaaaaatgcgcttgaagcggtacataacgcggtggttttagaggaagtcgccgccatggcgctggcgacacgctcgctcaatgcacatattcacctgcagaatgctttgtcagataaacattatcgacgtaaacacggcagcaacgcctactacgggcagcgctagccgcaccacgctcctgcttcgctatcacatcggcatctggttaacggatgccattgactgaaaaggactatcactatggccaaacctatgcttcaaatcgccctggaccaaaccgatctggccagcgccgtgactctggcaaaaagcgtcgcgggttacgtcgatattatcgaagtcggtactattctggccttcgccgccggaatggaggcggtgacgacgttacgccaaaaccatccgaatcacctattagtctgcgatttaaaaaccaccgacggcggcgcgattttatcgcgaatggctttcgaagctggcgcagattggctgacggtttccgccgccgcgcacatcgccacgattgaagcctgcaaaaaagtagccgatgagttgggcagagaaattcaaattgaaatctacggtaactggacgctcgatgatgccaaagcctggcgcgctctgggtattaaacaggccatttatcatcgttccagagacgcagaattggccggcgtgggctggagcgatgatgacctacttcgcatgcgcgctctgtctgatttaggactggaactctctataaccggcggcatagtaccgcaggatatccgcctgttcgaaggcattcgagccaaagcttttattgccgggcgggcgttaaccggcgaaaaaggtcagtccaacgcgcaggcattacgcgctgaaatcgataaatactggtcgtaaccgatatggcccgggaggctgataatgtatacaaacagggtaaaccagattgtcgggatctatgagaaagctctccccaacgccatgccgtgggaagaaaaacttagagtggccaaatctctgggctttgatttcatggaaatatcaatagatgaatctgatgaacgacgcgtgcgactggattggtcagacgagcaaatctatggcctgcgtcgcctgtgtgaacagtatcaaattccgttacattccatgtgtctcagcgctcaccgcaagtatccctttggttccgcagataaagttattcgcgaacaggctaaaatccatatggaaaaagcgattgattttgcttacaagatggggattcgcgtgatccaattggcaggctatgacgtttactacgaaagttctaacgaacatactcaccagcgttttattgatgggatgaaatggtgtgccaaacaagccgagcgcgcaggcgtgatgctggcggttgagattatggataccgactatctgaattcattgagtaaattcgaaattctcaagcgggaaattccctccccttattttatggcctaccctgacgtgggcaatattaacggctggaattacgatacggtaacggagctgaggctaagtcgcgaccatatagtccagattcacctgaaagacacccttaaggtcagagaaaatgcaccgggccagttccgcgatttggttattggtgaaggcgaagtggatttcaccgtcattttccgcgcgcttcgagatatgaatagccgtgttccattggttattgaaatgtgggcgcaggatgaaaactggcgcgaaaacattctcaccgcgcaaaaacagttgaatcaggccgccgaacgtgccaacttcccgctgtatttatccccgttatctcactgatttattgatataaaaaatccggagacagttgcgctccggatttttgttttgttgcttggaattcgtttttaccgttcaattcaaggagccgaatcttcttcccgctccttttcttaacgattacaacgcgcgcagaatggcttccacactagctttagcatcgccaaacagcatttgcgtgttgtccttgaagaacaacgggttctgaacgccagcataaccggtattcattgaacgtttgaacgcaataacattctgcgctttccacacttccagcaccggcattccggcaataggactgcgcggatcttccaacgccgccgggttaaccgtatcgttggcaccgatgaccagcacggtttcggtctccgggaagtcttgattgatttcgtccatttccagtaccacatcgtacggtaccttggcttccgccagcagcacgttcatatgacccggtaaacggccggcaaccggatgaataccgaaacgaactttgataccgcgcgcctgcagtttggcggtgatttctgccaccggatactgcgcctgtgctaccgccatgccatagcccggagtgataatgactgagctggagtttttcagcatttcggccacgtcttccgccgtcgtttcacggtattcgcccatttcttccgcatcaccgacggacgaaccgtcagtaccgaagccaccggcaataacgctgataaacgagcggttcattgccttacacataatgtaagacagaatcgcaccggaagaacccaccaaagcgccggtgacgatcagcaggtcgttgctgagcataaagcccgccgccgcagcagcccaaccggagtaggagttcagcatggaaaccacaaccggcatatccgccccgccaatggaggccaccagatgccagccgaaagccagcgctatggcggtcatcaggaacagacaaatgccctgcatcgctacgctgtcggttttcacaaacagcaccatcaacaggaatgacaccaccaacgccgccagattcagcttatggcgatgaggcaaagtcagcggtttagaagagataatcccgcgtaatttaccaaaggccacaatagaaccggtgaaggttactgcaccgataaagatgccaaggaacacttcggtcagatgaatgttctgcatcacaggctccattggtgcgccgtgatccagataactgttgaaaccaaccagtaccgcggccagacccacgaagctatgcagcaccgcaaccagctctggcatttcggtcatttcgacttttttcgccagataaataccgatggagccaccgataaccatagcgacaataatccagccaacgttgccggaatccggccccataatggtggcgatcagtgcaatggccataccggtaataccaaaagtattaccctgcttggaggtttcgtggcgggataaaccggccagactgaaaataaataaaatcgcggcaactatgtatgcagctgttacgagaccactagacatcagttaccccttagtgtttacggaacattttcagcatgcgctgagtcacggtgaaaccaccgaaaatgttgatgctggcaatcagtacggcaataaaggataagaaacttacccagccgccgtggccaatctgcaacaacgcccctaccacaatgatgcccgaaatagcgttagtgaccgacatcagcggcgtatgcagcgcatggctgacgttccacaccacgtagtaacccactacgcaagccagagcaaacacggtgaagtgtgacaaaaactctttcggcgccacgttggccagccagccaaacagcacgatggcgatcgccataaagatatatttggtccagggagacgaaggtttagcctgaggtttttcaatcggagccgccgcttttgccgcctgaggctgagcagaaacctgaattggcggcgcaggccaggtaatttcaccggttttcaccacggtaacgccgcgaatcacggtatcctcgaaatcgatatcaatttcgccgttcttctctttgcacagcagtttcagcaagttaaccaggttagtaccgtaaagctgggaagactgggttggcaaacgacttggtaaatcggtgtaaccaataattttaacgccattatcagtcacggtgattttgtctgcgacggttagttcgcagttaccgccggtttgtgccgccagatcgaccaccacgctgcccggtttcatcgaggcaaccatttctttggtgatcagcaacggagcaggtttgcccggaatcagcgcggtagtgacgataatgtccacttccgccgcctgcgccgcaaacagttccatctctgccttgatgaaagcttcggacatcactttggcgtagccatcgccgctgcccgcttcttcttcaaagtccagctcgaggaattcggcccccatactctgaacctgttctttcacttccggacgcgtatcgaaggcgcgaacgatagctccaaggctgcccgctgcgccaatggctgccagaccggcaacgccagcaccgataatcatcacttttgccggaggcactttacctgcggccgtaatctgcccagtgaagaaacggccgaattcatgagcggcttccacaatggcgcggtaacccgcgatgttggccatggagcttaaggcatccatcgactgcgcacgtgagatacgcggcacagaatccatcgccagcaccgtcacttgacgttctgccagttttttcagcaattctggattttgcgcaggccagataaaactgaccagcgtgctgccctcacgcattaaggcaatttcatcctcaaggggcgcgttaacttttaggatcagatccgattgccacacattcgccgtatccgtaattgtggcgccagctgactgataagccgcatcgtcaaaactggccagtcgcccggcatctgcctctatggcgacggtaaagcccaacttcagcagttgttccaccgttttcggcgttgctgcaacccgggcttcattggccaaccgctctcttggtacaccaatacgcataatgttcccttttagttctcttcgatgatgagtgtgtcgtcatcctgcctatagttgtgatttcgttacgccgaatcttcgcgccgccgaaacctgcttgctacagcttcctataacctactgaaaatgtgactgatgatccatatttgtctgcatcacattaacgctttttgcataaaaactgatagccaatgggaagattgtataaatgactatcaatattatatttaccagagtcttatcctgccatttatggttagattaaatttattccatccattctatgaatccagtaaatacgtggcctgaggttagcaaaatgtaaataaatcgagcttatgtcgttaattgtattattatcaaaacttatctgtattagcgggaaagaacgccattgattgccggtagtaaatagtcacactgtgcggcataaattgctgagacacctgccattattacatgtaataatcatcggctattctgttacacatcaatagttctgctcgtataacgttaatgcgcaaggcgaaaggattttttatgaagctgaaatacacgatcatcgcgtcagcattgctatcactgactgcattttctgctgcacaagccgcgcaagaattagcgccggaaaaagcagcctccattaaaccgttccaacgtataacaattaccggtcggtttaacgcaatcaatgaagcagccgctgcggtgtcacgtcgcgctgacgcattgggcgcagacgctttctatattcaggatactaacagcaataataacggcggtaactggcgtgtaacggccgatctgtaccacaaagatgcggaaaaagtgagtcaagagactcaataccgcaccttcaacggcgtaaaagagctgccgaagaacgaagcttatctgctggagccttttgataccgtgtctgtcagcggcttcttccgcagccaaccggatattaacgacgcaatctctaaagaagcgaaaagaaaaaatgccagcttcttcttcatcgtgcgtcaagtcgatgccaacggcggcggtaaccagtttatcaccgcttacgtatataaagctgatgcgccaaaacgtaaggtgcaaagcccggacgtcatccctgctgattccgacgcaggccgtgccgcactggcagcgggcggtgccgaagcggctaaagttgaactgccgggcgttgcctcttctggtacgccaagcaatgccgtgggtcgcttcttcgaaactcagtcttcaaccgggaagcgttacactgtaactctgtccgacggtacgcaaattcaggaactgaataacaccactgcggcacaaatggtgccctttgattcagttacctttaccggtcacttcaacagtatgaccgatgtttcgcaagaagtggctaaacgtgccgcagcgaaaggagccaagtactaccacgtgactcgtcagtggcaaaacaaaagcggcggcaacctgaccgttagcgctgatttgttcaaataatctttgcggggccgcctaaggttgccccgttttacttttgtttccgccattctttaccctcttcccgcccaacggcctttctggttgcgcaaatcctgaacgactgaataactttttatcctaatcgcataaccaatcattgcatccacaccccgcactccgtaaaatcttggcactttttagggctattatctttcagctatcggtgccgactccccatatcctgctagttgatagctgacatccatagattaattctttaaataccaggactgctagcattggaaaaaaaactcggcctaaccgcgctaaccgcacttgttctcagctccatgctaggcgccggcgtctttagcctaccgcagaacatggctgaagttgccagtccagcggcgttacttatcggttggagtattaccggcgtagggattatcttcctcgcctttgccatgctgttgttgactcgcctcaggccggatctggatggcggtatctttacctatgctaaagaaggctttggcgatctggtcggctttttctccgcctggggttactggctgtgcgcggtgatcgctaacgtgtcttatctggttattgtgtttgccgcgctgagctttttcaccgatacgccagatcacatcgtttttggtgaagggaatacctggcaagcattgatcggtgcctctttcctgctgtgggtggtgcacgccttggtattacgcggcgtacagactgcggccagcatcaatttggtggcgacgctggcgaaactgttacccttaggcggttttattattctggcggcgatcgcctttaatctcgagacctttacgctggatttcagcggcatcgctttgggtacgccggtgtgggagcaggttaaaagcaccatgcttatcactctttgggtgtttatcggtgtggaaggtgcagtagtggtttcggcgcgggcgcgaaataaaaaggacgttggtcgggcaaccatgctggcggtgttatctgcactgagcgtgtatttgctgatcaccttactgtcgctaggcgtagtaccacgcgccgagctggcagagatgcgcaacccatcgatggccggtttgatggttgaactgatggggccactgggtgaaatcgttatcgccacgggtctgattatttcagtctgcggcgcttacttgagctggaccattatggccgccgaggtgccgttgcatgcggctaaacatggcgctttcccgaaagcgttttgtcagcaaaataagaataatgcgccatcccaatcgctgtggtttaccaacggcgcggtgcagattgcgttggtactgatttggattaccggaagtaactataatacgctgctaactatcgcttctgaaatgattttagtgccgtatttcttggtgggcgcatttctgtttaaggttgcgctaaaacgtcaggattggcgcttgattgtggcggccagcggtgcctgcttatacggtttatggctgatttacgccgccggtatgctgcatttgctgctgtcggtattattgtatgcgccgggattattggtgtttatttatgctcggaaaagtcaccatgatatgcgcatcttaaataaaatggagcgcgtggccatttgtctggtaatggtcgctaccctgcccgcgacctggttaattatgcattaatttctaatatgttcagctatctacatatgttagtaaaaataaaatgtcagtaaaaataaagtagatgctgaacagccttttgtagcagaaatgcatgaatcaaaattgatattgaggtggcaagaagcccatcgattaatagaaaatttggagagaatcacagttggaggcagtttcgaggaagcagtaaagctaataaggctgcttttcatggaaccaaggcattgataaaaacaatccaagcatcgaaaaaatctcattacccaagggtatcaacaccatctgactaacaatgagacgttacaggatagcaacgatagactagatgatattgagcaacgcataaataacggaaaagaaaccgagcatcaaattcaaattatcagtgagcaaagccgaacttttgctgaatttctgagtgatagaatataaagataaaatggccaagagcgacgcttgctcgccatgaacagcatatttaaggctgaatgacgggcaaattaaccagcaaccgctcgccgtttaacgtcaaagcaacctgcggtgagcactgacgtgaaatagccgccaattgaccgatatccaaaccatagggtaattggacttccagagattgaatcccctgttggcgtgccaaccgaattaaccgaatcatattggtttcatcgctcacctgtgtagatagcacctgcaaagctaaggcggttaactgctcttgtgggttcttttctgattcagtttgagattttttttaccaccatgccgaagataggcattacaccataaatcgcatcgacaaaactccagcgttttttgcaggaagccgatagaaatttcatgtaatcaaagcagatggtttcgcgctgtatccgctcactactcatcccctaatcctctcttaattcaaaatagtgttggactacggctaaatagagacgacgtgacagtcagtgtcaccaatataatgacataattcccttactgtttaccagacggagccgacgctttaatcatacgaatgaataattgcgcgatacagctcaagattagacaccaaatcctcatggcattgccctcttcggcgcgctatgctgaattccgtcacttttatcgcagattcttatagaccgggaaacatgactaaaattgtttttgtcgaagacgacccagaagtcggaaagttgattgccgcctatttaggcaaacatgatattgacgttctgattgagccgcgaggcgacaccgcgcaggactttattaccgagcaacagccggatttagtgctgttggatattatgttgccgggtaaagacggtatgacgctttgccgggatctgcgtcctcattatgatggcccgatagtcctgctgacctcattggatagtgatatgaaccatatcctatcgctggaaatgggtgcgaatgattatattctgaaaactacgccacctgccgttttgctggcgcggctgcgtttacatttacgccaacggcaaagccagagcaaagagccacaggtagccacgctgaccaatcaaaacgcgattcgcttcggcctgctctgtatcgatccagttaatcgtcaggtcaatctgggtcaggaggaaattacgctttccacgtcagacttcgatttactttgggaactggccacccacgccggtattattatggatcgggaaatcttattaaaaagtctgcgcggcgtcagctatgacggaatggatcgcagtatcgacgtggcaatctctcgtttacgtcgcaaactttacgataatacgctggagccattccgcattaaaaccgtgcgtaataaaggttacctgtttgctcctaacgcctgggaatccgtccaacaatgagaaaactattcatacagtttttcttattgctgtttgtctgctttatggtgatggcgatgctggtcgggctggtttataaagtcaccgccgaacgcgctgggcgccagtctttagacgacttgatgaaaagctcgctgtcattgatgcgcagtgaactgagagaaatccccctgcgtgactggaataaaaccatcgaaacgctggatttgaatctttcgtttgaactgcatattgaaccgctggataaacgagatttagggccacgcctgaataaacgactgcgggcaggagagatcatcgctttagacgatgagtactcattcttgcagcgaattccgcgcagtcattatgtattggtggtcggaccggttccgtatttattctatttacatcaaatgcggctgttggatctggctctgctgattttaatcggtatgtcgctggcgttgccggttttcctgtggatgcgcccgcactggaaagatctgctacagctagaaaacgctgcccagcggctgggttccggacatttagatgaacggacgcactttgatccgacttccagtctgaatcgtctcggcgtcgcttttaatcagatggcggataacatcagcactctgattgccagtaaaaaactgctgattgacggcatagcccacgagttgcgcaccccgttggttcgtttgcgctaccgtttagccatgagtgaaaatctgagcgaaacagagcaactggcattaaaccgggatatcggtcagttggaatcattgatagacgaactattgacttatgctcgtctggatcgccctcaggtttctcttaatctggagccaatagatttaccgacctggctgcaaactaaagtcgaagatatgcgcctgattcaccgcgagcgagaaatcgcgctggatattccgcacagtggcgattttggtgcggtggatttacgcctaatggaacgagtgctggataatttggtgaataacgccctgtgctactccaatcagcgtttgcgcatcggcctgtggttcgacggcgatgaagcttgtctgcaggttgaagacgatggtcccggcattccgccggatgaacgcaccaaagtgtttgagccttttgtccgcttagatccaagtcgcgatcgcgcgaccggcggctgcggtttaggcctggcaatcgttcactccatcgcgcaggcttatcagggacgcgtttttgtagaaagcagttctttgggcggcgcgagcttccgtttctgctggccagtcaaagattactacagtttatccgtagattcagacgcagtatcagataaaaaataaatagcaaaaaaacgttgattatcatcggttaactaatggagtgccctatgatcacagcctatcatcagctgcgcagcaccttcactcgcctgtctcgttttgaacatctctcggctattgccggctgggacatgcaaaccatgatgccccctaaaggcaatttggctcgctcagaggccttggccgagctaaacgtgctgcatcaccaaattctgaccgcgccacaggtcggccaatggcttgagcaggcggaacaggaaactctgaacgatattgagaaagcgaatctgcgcgaaatgcgtcgccactacgataacgcggtactggtgccagaaagtttggttgaagcgaaatcgctggcaggcgcgcgttgtgaacatgcctggcgtcagcaacgcatcaataatgattgggcgggctttgcagaaaatctgcgagaagtggtgaaacttagtcgtcaggaggccgagatccgtgcgcaggctgccggcacatctcgctacgatgcgttattaaacctgtatgagccgggtttacgcagcagcgatttggatcgtatttttggtgatttaaagcaatggttaccagatttgctgcaaaaagcgatcgtcaagcaggctaaacaaccacatttaacaccagtcggcccatttgatttagagaaacagcgccagcttagcctgagtgtcatggcgctacttggttttgattttgacggtggccgggttgatgttagcgtacatcctttctgcggcggtgttccgcaagatgtacgtatcactacacgttataacgagaaagaattcactagcgccctgatggggatcgttcacgaaacggggcacgcccgctatgaacagaatttaccgcgcgaatggttaggccaacctatttctcatgctcgctccacggcgatacatgaatctcaaagcttgctatttgagatgcaattggcacgtagcgacgagtttctaaagcttttgctcccccttgctatcaagcactttggcgaacaagcggcgttaaccgaggacaactttattgcgcttaatcagcgtgttgaagccggttttattcgggtggatgccgatgaggttagctatccggctcatgtgattttgcgttacgaaatcgaaaaagcgctgatcgaaggcgaaattgaggttgaggacattccggcacagtggaatgaaaaaatgcagcgttatttggggctaaataccgagggcaactatcgcaacggctgcatgcaagatattcactggaccgacggggcttttggctatttcccaacttataccttgggcgcaatgtatgccgctcaattattccaaacggctcgtgaagcgattccaaatctggatcaacaaattggtaatggcgatctcagcgccttattcgcttggttgcagcaaaatatctggcagcacggtagccgttatctcaccgacgagttgataattaaagccacgggcgaaactcttaatccgcgtttcttccgtcagcacttagagcgccgttatctctaaatcttgcctcaggccgcctgaaaatggcggccatgctttgcccctggcattcataaattatttaataacaaccactcacactaatttttaatgctaatcgcacagccgaacgtctaatacaaacaagatttaaacaaaatcccgtttcccctgtgaaatcccctaaacccctaaattggatatttacacaccaagacagaacgccatattgagcagcttgggggctacctaactgccctgctactatctgcaggacttttaggcgttgttatattccccgattatttgttaatcgcaaaagcttcagatggcattatttgaactaaagcacgctgtatgttgtaactaaaatgagattcgaagtgatgaagttatgctttagcatcatcaactcttggctatgtgcagaaaatgcagaaaagtacgatgggtaagcttttactcttcagaggcgtaaattgcgtcgcttgatttgtcattatatttgatagagctgcttagttagactgataagagaggttccggggttagttcgaaatttaagcgggtaaaactatcagcccacaaattcctttgtttacctcagttaatgctcgatatttatttttcgatgccccctccccgcacctctttaaataagaatggccatccctgatagagataatcgagggatggccagagtcttagattagatttattacagtatccagtatggcatcaaactctgtttacaatgccaccccattaacactgaattccaggttggatgttggtttagcaatatcaatggacgatacctccacgccgccgacaaaaatagatgcttttatcggattcaaaccttcctctacgttaatgtggaatttgttcatacaggtggcatcaatgcggttagcagagagtttgaattgctgaacgaccccaccttcgaattgtacttcgagataacaaatattggctcggttaccgtcaccttgataaaccataccgaatgaaccatgtaatgccgggaagatataactgctcagcgccccctgaggatcgtaataaccaaccaatgtagtgaccgctaccccttgtttatatggacgtttggcttcgctcagcgagtaatcggcaacttccaaccaagttttaccattagataaataaacggtgttgtggttataggcaatggtatagagctggttattcacatgaagcaaagaagtagagttagttacgtttttaactcgtacggctttacctttattctcctctgtagcaataggaatataaatatccttagcaaaactcttatttttaaacgacacggtaatcagatcatggcgttcaagtaatgccgtcattgatgccatggtaacttctgaaggcgctgcatctttatttgacttggtttccacccggttttcccaaggttccattgtttgagtcgtggcattccacttattaaaaccggtaggcgaatggcgatcaaatacggctttattctccaggaaagtttgaatttttgataacgaataaggtgtatgcagggtaaaagcattactttgcatatacattggcgaaccactcgccatcgcatcgcgaccaaaactgtgcccggcaaaaggtgctgcgcattgctcatcctgacaggttggtttgttgctgattgtattttcgaagttagggatgaactgatcgttatcgctgtcccaaccccagcaggagtttggcttatccggagcctgatgaatagaacccgcgtatccgtttggataatgtcctaaaccgtagttatggccaacttcatggctgaactcattcccaatactgctttccagggtcacaataccgccgccgccggataaaccatgtacgataatcccattgacgtacttaccaatggaattatgcgcagtaagctgtgcggtactgtacggatggccgttttcccctttcccttgtgaggagttgataccgtagttagcattattaataccgatggaaatcagttctttaccaatgcgctgacgcattgttccctcataaacgccaccggtgcttggatcgtaatcggttagcagcacaccttccggcaacatcacttctttgaaatactgcggttcgtactgtgaaacgatcagtcggctcaatggaacctgttggaaatactggcgatgatattcattttttttctggaattcgaatgcgttgcgatacggcgttaacatacctaaatcaatggtgtggataattaactcgttcgacgccccaacctggatattaccaagttggccgtgtttgccgttatgttcaaaatcaagctgaatacctggaacgattttttcaaacggaataatgaccgaccagaagccttcaccaaaagaaatctggctatatttcacatcatccagactgtaccaagaacctttataattacgcagcactatggtcagaccacgattcagcgtaacttttttacctgagtagtggataaatgaattatatccggcattcgaggagaaagtgactaatttaccatccagttcatccgcaacaggcatataaaaatctttaatccaaccaccatctcgagtgctgatctttaaactgttattggtagaaagaatggatttaatctgattaccttgcgtatcattttgtagtttattcagctcggcctgaccagaaatggatttgtcataaactgccggttcaataaagtcatcttcactgccgttgaagtctttaatctgctcaaccagccgcgtcaagtccttgggcggacgcagggtgtaagtgccagccacctgattttccgcatctttcagagtcaaagtgaccggaatagcctcgtcaatctcttgttttgatttaaacaggaccatagttttcttatgcgatgttaaatgcggctgaatatcatcgttaagatgtttaccagccggaatcacactgttctgtacaaaaagaatagaggcagaaagctccccaccgagatcgcttggaaaatcgttgttattaaatgtaataacgttttttttgtcggtcgttgtcttttccatttttaataccttatttaattgatgttttttttcacagagtaatagtcttgggccaatatctacccttcccatccacagatattaacttgcgtattatcatctactgccagttaattccgcggcatcaagtaaattgcataacaccagatagaattagactgaactgattgctgcggcattccctagcagataaataaattaattttattattaattgtaaataataaactccttatcatttcgcttgggagttaacagcctactccaataaatccgataatatgatttaattgtctttctcagttaaaaaataactgagcgagtgtaacttacaaataaacattgagtgcagtcagaaattatcggggtaaataagaatatgacttctcaactccattaattttgatgggatgatttgcatacggctagaacaacaaaaattgttctctgaaaccaagcaaaaagactcacgtataattgggtgttggctggccggatgctctgataaatgtttatctcgtctttgataaaatttattatcactatcgcgctatttacgctaaagagattctaaaagataccgataagtcatagtgtagcttacatggcgtcgccttaggcgctcgttttttattcgacctgagcaggccttaagaatggaacaggtgttaccctcaacgatagaactaacgcccagatcggagaagatagtgccttattctgctcatgcgcaattatcaacgcgaaacagggatagcacagaaagtaacttgctgataacagaaaaaatcgacaacaaagattctggctatttgacgtggcagaaatcgatcggtgattcactgagtgacctttaccagttatctgatgctcagacaaaacaaattcaagaacaaaatgagcagcatagattgcgtattcacgcgctgtggcaagatatggaaagtcatatttttcaacataatagagaatacagccagcaattattgtcctatcaggataaagtgcaaaaatcgctaattgaatttgcccaacaaaaccagtgtgatgctcaaaattacaatacaaagatggctgaagcgttagaaatacgatttagtcggttaaaccgtcaattggaattaagtaatctggctttggataaacaaattagccaacagcatcgtattaccagaaaaatgacgctggcattaggcctgaatattctattttcatttatgttactgatgacatttttttatcaacatctcggctggttaaccatgcagtaattcaatattagaacagaaatggcccatataaatatgagccttttttatcaattttgtcttagcattaattccgcagttcgcgtaagtcaaaacgaacaggaatagtaatgctgatttcttttcgattagccattatttcctccggcgctggcggtaaaggttgcgcacgcttaggcagagccaaagcttcattatccaacgagtcaacgccgctgcttttcattaagcgagtcgctgaaaccagccctgctttatccagcgtaacgcgtaccagcacgataccctgccgactctggcgcaccgcaatgggcgggtaacgcttatggcggctaaggtgtcccagcattaggctactccagtcaggtatgccttgggtctgcgcaaaactgtcactggtgtaaggcgcggcgatacgttgctctgctgcgctcggaggcgcgctggttgcttcggctgacggcgtagtacttggtaacgagtccagtgagggcgcattatcgttttgcgtttcacgacgctgacttaccggtttcggtttttctatgaccttatttttcgctgccaatattgcgggcttcatcgcttccggcgctgccggctgcacgctttcctgccgttccgtttctgatttcacgctggattccggcgcagatagcactttgggcggccccatagggacatcatttggcgcggggacggattctattttgtctgccaataccagcatcaacgccggtggcggcgcggcggtaaccgaatccgcagcaacataatgataagccagccagcagatcaggccgccgtgtaacagtaaagccagaacggtgctaccactccaacgaacacgctcccggccacgcataggcatcatggcaatatctgacggcgccgacaggctatttttagtggtttgcattgttttcctgcttgggtaagaaaggataacgaggtaactacaaagaaggtcacttgagttggctatttgggcagtaaaaaaataaaaacagtataaacattggtagattagttattcgtcagcataattcatcgaatatctatctgaacccaataacgagagaaatatttgacctgaactggcaagacatcgggtaacgctttaagaatgcggtcagtatccgccaaagggaaaacccccgacaaacgcagactggaggcttccggctgacaacgcactacgccggaacgatagcggcttagttcggcaagaaaatcactgagtttctgattgtcgactaataattgcccctttacccaagcgcttttttctcgtattaacggcttcaccccgcatccagatgcggacagccaaccaccctgcccagccgggatagtcaggctctgcctaagagaccgcggtgataaccttaccgccccctgataaacatccacctcactctgcgttccctttaagtaaacgctaaatcgtgttcctatcgccacaatacggccctgtggcgtttccaggctcagcggacggggaaaatgcgcctgctgttccaactggccactttccaccatcacttccccccgaattagcacaatctggcgagccacatcgctgtaacgcacattaaccgccgtttgagtattgagctgtaggtgcgtgccatcttctagcgtcagacttttttgttcgccaatatcggtgtgatagtcagcctgccaagatagccagcccctagagtgaccacccagaatcacccctccgccggtgatacagctggcggccagtaacttcaatacgccccgccgattggttttccccaatttggttttccccaatatagataaagtgctgtgggctgcctgaacgttgaggcgactaaaatcggcgcaacaagactcaatatgccgccacgcccgctcattatccggatgctgattacgccaatgtaaccacgcctgccgatcctgttccgtcgccgcatcgtccattaaatgcgtcagccagaaaaccgcctcccgcgcgctttcgctggcaataggcacgccttgggcatcctgaatcgtcggattattcattgggggcatggtcatttcagcagctattcatatagggagatgtttacttaagacggcagtcatctaagaagatagcgcgaaaaaacactgaagattagcgcgctgtaggtactgtttaaccgaactggcagaaacccgcagacgttcagcaatatcgctgtagcgcataccctgtaagtgagccaacaggaaggcttccctcacctgcggcggtaaaccatcgagcgcggcatccagtttttccagaatttccaaggttaatagacgagtttcaggcgatggcgtaaccacttcgggtaatgcactgagagccgagagataagcatcttcaatcgttttgcgacgatagtgattagccaccagacgccgcgccacggtggctaaaaagggacggggctgacgaattgcctgcgcatcgggattaatcaggatattcaggaaggtatcttgcgtgagatctgccgcatgttgcggacatcccactttgttgcgcaaccagtgataaagccaaccgtgatgttcgaagtaaagtcgctgggcaaaaccatgcgcactggctgatgtctccctcatcgtcaattttaaccccgaaaattacagctcacttgaatgataatgattattatttatattttcattattctatgtcaagttattactcgcagtgagtcttatttttatagcaaaccgcttatttctcccttttggtttcccgtcgtagtccctgtctatatggcaaaaaaacggcatccgccaaggatgccgctgtttgagctagcgttggtcttagaatcgttgagaaacgctcagctttatattacgaccaacgccagagaccgactcgccaaggtacgggtaatactcagtgttaaacagattatcaaccgccacccgtgcttcaaatccatccagcgaagctggctgccagctggcaaacaaaccgtgcaatacgtaacctttggttttcggtaatgaccagatatccgctttaggatcgccatctgacggagaacggtcctgcttccgcacgaaatcccctttccagccgaatgccatgtcccattcaggcattttaacccctagcatggcatgtgccgcagtcggtggaatttctgcaatccaggtgcggttgccccaagggtcgcgcggcgaagcatctctttccccacgaatggtggaataagacaagttgccgaaaattcgctcactatcatagaaggtttcaatttctaacccttcgatggtatagcccggtaaattgcggtaattggaaagtgtcccactacaggaagacgaactaccgctgacagattgggcgtcacacagcacgccgcggcgatagaagatttcgtttttaccccggttacggaacaaggtagttcgaatttgcagactgtcctgtttcgtcatcagatcgttaaaatcgaggattgcgcccatgcgaatcccggtgatggtctccacatccagattgcgactggtgcccggtatgctggacgccccagactgcacctcgtactgctcatccaccaccggcgcgcgccaggtgcggctgatgtcagagaacaatgacagattctgcgttgccttccacatcacccccaaatgcggagaccagccggtgtaagtcacacgactgtagtcgtgaccggccgctggatcgcggtcattaaaacgcggagcgaagttcggctgcccggtattggtcacgtgatcgtatcgcacacccggcgtgacggtcaggctccccaacgtcagcgcatcttgcagatagaggctgcgggtttcctgctctcccgctggcatataataaggctggaaatagccatagttatagctcgggttatttttttgagctggatagtacatcaaggtgtcgcgttcgtgtttatgccagcgcgtccccaccgtcaacacatgttccagcacaccagtgctaaagctgctttcattgttgatatccaacatgttgtctttataactgacccagctttcattacccaaactgccgaggaaactggtagatgccgttttcggccgctgatcgtattgtttggtgctggaattggcataagtcacggtcatattcagtaacgggttatcttccggagaaatattccattttaccgagtagttgctgtccacctgatcccgtaacaccagcttacgtcgccaggcttcttcatagccatatttcttgatatctgcggctgatggggacggcatatcgtcacgtttggcggcaaaaggctgccagccatcggattccgaacgcatcgccgataaggttagagtctgagaatctgtcagataaatattggtcttgagtaaataagaggcctgatcgttagtggagtaggcaaatcgcgtgccgtccgggcggcggatattatctccgtcacgtttactcatatagattaagccgtcggccagcccgttttccgtgcgaccgtataaagcagaactatagatattctgtctatcattagtgtggtaactgtatttcagcaggccaccgaagttttcacccggtttaagcatatcaccggcgtctttggtttcgattttcaccgtcccgccaaagcccccgttaccattcagcagattgtgagggcctttatccacatcaatacgcttaatcagctccggctcaataaataccgaaccctgtcgatatttttcgaatccttttggcgcaccatcgagggtgatttttacatcttccatgtcgcccatgccccagatattcaggctttgcccgccgggacgtggcgatccagccatagaaacaccgggtaaacggtcaattaaactggccagattatccgcctgcgctcgggcgatatcttcctgacgcaaggtggaacgccctgcctgtaagctgtttgccattccaccaatcaccgacagctccggcatggtaatgctgtcatcggaaagccacgcctgcggaacttccatcaaccggtaaccattcggcgttttgaccgcctgtagcccgcttcccgccaagagttgtgcaaacgcctccgacaaactttgcgcgttattcacgctagcagcggttttgttctgagtctgctcggcggtgaaagtcagaataatgttagccttgctagctaaggtctgtaaggccgcggtcaacgatcctcccggaatgctgtactgcgtcgtccccgcgctaacatgctgatccgatattttttcctgagccatcagttgacccggcagactaatacctaacgacagtagaccggataaagcgtagctgacagggcgagcggcgcgatgagatgatagttgctggtgaataaaatgcgctttcttaactgccatggaaatatgctgtgatttcccgctattttttatagtcataacgttccctgagtgcattgatatgaaaactcatcagagaggtcacgcgagaataaaaatcgggcagaaaaaaaacataattgtatatatcgtcgtttagcctgagcaatcgcccccacgcaggcgactggttttcaagtataaacagccgctgtacaaacggttacacgccgaaaccaatgactcacggatcttcccatcagcattccctacactctttttaacggcccaatcgagccgcccctaaacagaatgccgaggaaacacccatgaaaaaattattagccttagttgttgctgctactctgggcttgtcttctgcggctttcgccgctgacaccactgccgctgcaccagcaaccgctgccactcataacaccacggtaaaaatggctcatgaaaaacacgccaaaaaagccgtgaagaaaaccgagcaaaaagcacaggctgctaaaaaacaccataaagccgtaaccaaagcgccagcgcagaaagcgcaggccgccaaaaaacaccacaaaaccgtaaccaaagcgccagcgcagaaagcgcaggccgccaaaaaacatcataaaagcacggtaaaagcggcaccagcggctaaataactgaccgaatgtaacgaagtcacacctgactcgctcaacacccggttataccgggtgttttttatcgggggtcgtcaccatgctgcgtcgctacctattcgaaatcatcctgaccgctctgattctgtgcggtctgattacccttagtttttacttataattctaattaagccatcacacgaaaatatcgaaaaatcaattgctgaacagcccgacagggtgaattatgtctatagttaccggtagcaatattcctaattttgccggaatcagcggtttttttgagtgttaatggatgacctttgcaaggcagattatttatgcgcttatcatcactactactgttgagtctgttacctttttccgtctccatggcctacgccgactccccagaaacggccagcgccaaagatcaaaacacgttattcttcggaaaagacgatcgaacagaggtgaccaacggcgcggattggccgtggcaggcaattggacaaattgaaacggcgagcggcaacttatgtaccgcaacgcttatttcccctcacctggttctgaccgcaggccattgcgtactggctcctccaggaaaaatggataaagctattgctttacgttttatttcccacaatcagaaatgggcatatcaaaccgggaagctggaaaccttagttgaccctaaactgggcaagcgcttgaaaccggacggtgaaggctggatcgttccacctgctgcggcggcctatgattttgctcttattcggttaaccagttcaaaatccttacccattaaacccttacctctttggcaaggcacatcagcagagctaacgcaggcactcaaacaggctaagcgacaggtaactcaggcgggttatccgctggatcatctggatagtctgtacagtcatgaaaactgtctgattactggctgggcacagcaaggcgtcctatcccatcagtgtgatactttgcccggcgacagtggttccccgcttttactcaaaggcccggaaggctggtcgctgattgcaatccaaagctcggcccctgcggctaaagaccgttatctggcggataatcgcgcgctggccgttacggctatcagagaaaagctaaatctgctgagcaaaaagtctaaagataagtaaatattcttcgctgaattgacgagtgaatagccggcgtgctcatcagagcacgccttcttccttccttctcctgctagtcctgggcttcatttaaatagcaaaaataaagtcatcaaccttgctttggattttctcttttactctctggctaatggcggcgtagcttctttcatgcagtgttgctgtcgtcatataaacatgaatatcgccaacaatcccctgcgtagaaaatttctggctaagtaaatggcctttcactgtctcggcggtggtgaaaaacaggcaaagcgtggaaataacattcagatccgacacaaaattcacctgtagcttcactcgggtgacagtgccggaaaaaggttcacgtataaaatcatcggaatctgtttcagcgaaagttccagcgtgataaacctcgattgcctcctcagtgaatggcttctcaagtaataattccattccactggcgacgaaacgccaggcatctggcggcaccatctctttaaaaaaaatcgctcatcatgtctttgagcactagttctgcgccgatcttatcgggtcgatatctatcagattgtacgtcagagaactgccagaagatcgattccaatatttgcacatagttcacaaaccaacttttggatgacaagaatcgcgatgttttttcatctgcgtttaattgcgctaagaagtaggagtaaagcgagttttgtcggaataaattattcgtttcaggatgaaagacaaataaactgccgtaatccacatacacgtccgattgatagaaactcatacacacctcgcttggcatgaattgaatagcattacaggggtgttctgacggtcactcatctataaacatagatgaaaagcgttattaatataaaaaaatttttatattaatattcattgtccgaatcaacttccaacaaacgctgaccttcgaataaatatctttacagccctcacaaagcgggcgcaaccaattataattaaaggaaaatttaaataaaaaccatgagcaaaatcaattatcgcaaagaatgcaccagcctataataagaataacattcaaataattattgatattaaaattaatgaacttataattcattcactatcttactccacagtaactattaaattaaaacttagagcaacaattaatatttatagttaaatattatttattaataatagttttcataaagaatctcattaatatacgtttaattatattgataaaagcaaagtaatagattctgtatctttcctcaccgttgtttctgagtctaacgagataccaccgcgcgatcgccgcgtacaacggcggactgcacggtgatagccgatcaagactgggcggaaagttgctcgatagtttgcaggatacgtttatccgaaaccggataagcggtacccaattgttgagcaaacagactcacccgcaactcctcgatcatccaacgcacttccttcacatcatcatcctgcgcacgtttcggcggcagtttatgtagccactgctgccaaacctgctgcacctgctcaacccgctgcatttgagcgcgatcgcgatgaggatccaccgccagtttttccaaccttcgctcaatcgcatgcaggtaacgcagcgtatctggcaggcgtttccagccgttgtttgtgacaaaacctcgataaatcaggccggaaagctgcgttttaatatcagaaagcgccaacgcctgcgcgatatcaacacgccctttcaaacgtttgttgatactgaataccgtcgtcaggatttgctctacctgcttggcaatctcaaccacggtatcattcagttccgcccgaacactctcctgtaagcggctaaactcctccgctttccataccggcccgccgtactgagccaccagtttgtctacgccgcaggcaatacaatcgtcaataagatccagtacgttgccataactgttgaaatacagccctaatttggatttattcggcagtttttcatgtaagtacttaattggcgacggaatatttagcaaaagaagacgccgtgtgccctgccacatggcttgctgttgctgagtttcagtttcaaataaacgaatggctacgctgtctttttcatccactaacgccggataagccttcacttcataaccaccgcgacgctgttcatagcaggttggcaaatcgccaaagctccagatatgcagatcgttttgctccaaaccatcgtcagccacggcggacaaggtttcctgcactttttcctgcaactggattttaagcgcagccagatccttaccttctcgcagcgggcgatttttatcgtcaacaatacggaaagtcatgcgtaaatggtcaggcacctgatcccactgccagctctcacgtgacaccgtcacgccagtcatgcgccgcaactcccgctccagcgaatccaaaagcccggtttccagtggcgtggcgcgagccagaaaggcctctgcgtaattaggagcaggaacaaaattccgtcgcaccggtttcggcagggatttaatcagcgcgataaccaattcccgacgtatccccggaatttgccagtcgaagccttgctcttgaatctgattcagaatgggcaaaggaatatgtaccgtcaccccatcggcatcagcgcccggctcaaactggtaggaaatacgaagctttaggctaccctgataccaaaaattaggataatccaatggattaactttgttggcaccatccttaatcagcatggttttttcgaagttcagcagctcaggctgtgcctgactcgctttcttccaccagctatcaaaatggcgcgctgagaccacatcacgaccgatacgctgatcgtaaaagttaaacagtgtgtcatcgtccaccagaatatcccggcgacgggacttgtgttctaactcttccacttcggccaacagtttcagattttcacggaaaaaagcgtggcgcgtctgccaatcaccttccaccagaccgtggcggataaacagttcacggcacagcggtggatcgattaagccatagttaatcttacgcgccgcgacaatcggcagaccaaacagcgtcactttctcactggccatcaccgcaccctgagctttctcccagtgtggttcgctatagtgatgtttgaccagatgctgtgccagcggctcaatccattccggttcgatgcgtgcggcaattcgcccccacaggcgactggtttccaccagctccgcgaccatgacccatttcggcggtttcttgaataaacccgagcctgggaagatagcaaaacgggcgttgcgagcgccggtatactcttgtttatcagcatctttctgcccgacatgggaaagcaatcccgtcaacaatgcagtatgtacgctgcgataatccgaaggctcactattcaccggcagccccaactctctcacgacctgacgcagctgggtataaatatcctgccattcccgaacccgcagataattcaaataatcgctgcggcaaagtttacggaactgcgccgatgacaactctttctgctgttccttgaggtaatcccaaagattaacaaaggccagaaaatctgattctttatctgcaaaacggcgatgtttctcatctgacgcttgctgcttatccatcggccgctcacgcggatcttgaattgacagcgcggcggtaataatcatgacttcgcgcacacagccgtttttctgggcttgtaataccatgcgagctaagcgcggatctactggtaactgagccaattggcggcccaaaggcgtaagttgctgatgcccgttatttgcagtttggatcgcccctaactcttccagcaagcgtacgccgtcctgaatgttgcgtttatccggcgcttcgacgaatgggaatgcggcgatatcccccagccctagggaggtcatttgcagaataactgacgccagattggtgcgcagaatctccggatcggtaaattcgggacgagacaggaaatcctgctccgaatacaagcgaatacaaataccgtcggacacccgtccacagcgccctttacgttgattagccgaggcttgagaaatcggctcaattggcaagcgctgcactttggtacggaaactgtagcggctgatccgggcagttccgggatcgataacgtatttaatccccggcaccgtcaatgaagtttccgcgacgttggtagccagcacaatgcgccgcccgtggtgggattggaataccctattctgttcactgttggacaaacgcgcatacagcggcagcacttcggtatgaggcagattcagcttagtgagcgcgtcggcggtatcacgaatttcccgttccccgctcataaagatcagaatatcgcctgggctctctcgacccagttcgtccaccgcatcaaaaatagcctgtagctgatcccgctccacgtcatcggcatcatccaccacggggcgatatcgcacttccaccggataagtacggccggaaacctcgataataggtgcgttgttgaaatgacgagagaaacgctgcggatcgatagtcgcagaggtaatgataaccttaagttcaggacgtttcggtaagagttcacgcagataacccagaataaaatcaatgttcagactgcgttcatgcgcttcatcaataatcagcgtgtcatactgcattaacagtcgatcttgctgaatttcagccagcaagatgccgtcggtcatcagtttaaccagggtattctcacccacttgatcgttaaacctaaccttataaccgacgcaaccgccgagagtagaatccagttcatcggcaatacggttcgccacggtgcgagcagccaaacgcctcggctgagtatgaccaatcacgcctttcacaccgcgtcccagttccagacagattttaggaatctgcgtggttttacccgaaccggtttcccctgccacgatcaccacttgatgatcgcgaatagcattataaatatctgcctttttctggcttaccggcaggttttccgggtaattaatcgtcggacacgcggctctacggctggcaacccgctgcgcggcaacggcaatgtcattctcgagtttatcgagaatcggttgcaggtcctgcgggttagtgattttgcgtgcgccttgcagacgacgacgcagccgttgctggtcgcggagcatcaactcgccaagctgggcggataatgcggcgagagaagatttcacgttcggtattccttgttacatcggccttggctctgggcggaggcatgattttcttagactatattgcgagacatggtaacacaatccgcttttccgccctatattccgcgggttgtagccttccgcaaattttattcaataaaatcgaacaaagaacgcaaaatattgcgctatccctactagaaaaatatgaatacagtgtattccattgaaagggtatcccccttatatcactgttacctattaaggaattcccatgagtaaagttctggttcttaaatcaagcattctggcaacgcactcacagtccaaccaactggccgatttttttgttgaagaatggaaatctgctcacgccggcgaccaaattaccgtgcgcgatctggcagctcagccgattcctgttttagacggtgaactggttggcgcacttcgtccttctgatgcaggtctgactccgcgtcagcaagaagctctggctctttccgacgagctgatcgccgagttacaaggccatgacgtgatcgttattgccgctccaatgtacaacttcaacattcctactcagttgaagaactatttcgatctgattgcccgcgctggcgtgacattccgttataccgaaaaaggccctgaaggcctggtcacgggcaaacgtgccattatcctgaccagccgcggcggtattcataaagataccccaaccgatcttattgttccttacctgcgtctgttcctgggtttcatcggtattaccgatgtggaattcgtattcgccgaaggtatcgcttacgggcctgaaatcgcaaccaaagcacagacagcagccaaagaaatgttagttcaggtagttacggcttaattccgccctatagaggcagaattttgctaggccctcgtcatacccattagtgttatatgtcattgcgcaccgtcgggtgcgcttttttagctctggcagtctacgggcgtaatgtttccctcattgagtccgtgtctaacaacatcatcgtacttttactttattcatcagtcgccagcccattaacccattgcccttttagcgctgcttttattgcctgatgtttttcgtgtcccccggcaatagcaataaccgttttttgcggcttgacgtgcaaagtgacgctggtcaggtaattaccttctcaacgctgcatccactggccgttaattccccgcacaaattcccccggctgagcacgactcaccaacttttgccctgcaagtttggccacttcatcggttgttacgtggttatttttggccacttcctgatacttttcttctctcgccgcattaatctgcgccaccagcgccagcgtttcggcatctttctttaccggtgccaggtagccactaagcgtttcccccactcgtccctgctgcttggcctgatctaatgtcagcgcccaagcgccagggctaaacaataaactgcttaataccagactaaggccaacccaccatttcgtttgctttttcatgttggctcctagaacagttcagattgatttttcaataaattctctacgtctttatcgactttgatgcgaatttcatgctctatctttacgttcatattgatggtaatcggtttctctggcgtcgcaacctccagccgcacacaaccactgagtagcagcgtgcctaagacgatgattaccccatactgctttgccaacatcttcatttggttttcctcgtcgatatgcccgaccgccgcataacgctgtaattaatcaccctatctgaaaagagccctccgtgaatggaaaacctccctacacactgatagcacctgccataagctactgaattgattataaccgtaaccaagacggtttctaccgctaaccgcggctaagcaccgacaaccgaacaaatttgcgcagcgctacgcataatttacggcaaaatcttccccaacgcataaatagctttatgctgtcgccatcaaggtagaatttacgcaataccaaccacataatttgaatatggagcaatcaacatggaacctcgcatcgccacgctttccgcccccatcaccgtatctggcctacgcattcgtacccagaataacgatgaatttaatcaaaaaaccgccaaaatcaccggtctgtggtctgagtttttttccaaaaatctggcggaatgcacgccaaacaagctcgataactcaccgatttatggcatttatactgcctatgatggcggagtaaccggttattttgacgtaatggctggcgtcgcagtgaaagaaaaaacagaggacgcagactcaattgagattcaagccgggtcttatctggtttttgaggctaatgggccaatgccagcggccattattcaggcgtggggcgatgtctgggcttattttgaacagcaccctgaggtaaaacgacgttttgctaccgactatgaaacatatatcgacgcagaaagcgcgcaaatttatatcggtatactgccctagtctgtgggggaaaggaaagcccattgcaagtggctgaaacttgtaaattatgttaaatatcaaacatctaatagagttaatacattttttagcgacgagtgactaatgagcttccctgtgatttcaagcctaagcaggcgcaggcaaacacgatgcggttagcgctttcaccctagttttaacggatgcacactattttgtggcaaccttatcatctgaatctgacgccgcagcaacaggtgccgtcggcatagaaagcgtctgctccaaccattcctgcaggttgtcgccaaaacgcagactgcgccacagttgaaatacgttttcctgatgggtgtaattcaacacaatcgcacgcttcgcgtttttctgagtattgacgccgtgaattttagattgcaacgtcaactcacccagattattcagactcaccttggcataggagtgagaaatctccagatagcgcagccagtcaatcacggcaccggtggcaacgttgctttcgccaatagaatccgccagatccttttccaaacgcagagtcagtaatcctgcgttggcaatccagccgtcgcgtaccagccactgcggatcgtttagaaagagcggcaactcgccgtcgaccttgccagacatagcaaattgcttgggcttcaaaacggtaaacaaagcgcttaaatcgacctgttttaatttcagcaccgccgcatcgtgctgtggtaaacgcaatgccgacaggcttaaatgtccatccagaatatccattcccacgttactgagggttaatggttttttctcggtgtacggataagtgccctgcagatcggccgtaatattttgcatttcaaacaaattggttaaggcggcaattcgcagagtcaccggttctttagctccaagctgccactgatggtctttcaggcgataagacatcacaaaatccagaccgctcatttcgccgtccttgagccacataccgccctgtttgaccacccagtgtccaccggcggtaaaaccttgctcacgcgcggcagaaaatgcggcttgcgcataaaactcgccgtcacgcaatttgataccgagattaggggatagcaagggctgaaatacctgcaaagattgtttcggccaccaggcttcccctctcaaacgctctccgtcccaacgccctcgcaaagggattggcccaatttgctgtgccgctaaatccccctgaaactggaaatcatccggattagtgcccttaaggcgcaaattcatcaccgttgcaggaagatagcctccatcgctcaacgccacgcgtttggccgttaactgcatattgccgttgaacgccgcttgttcgccattgcgctgccacatcagcggttccgttaacgtcagtctcggtgagaatacattgaccatcccatactttatctgatcaaaaccggtagaaagctgatccaaatgaattaaagaatcttgccaacgccctttcccggcaatatcccagcgagcagccaggggaggtaaatcgcctttgccccaatagcgccattgccagataccgctatctggcaaaaagttttgcgcgctgccatccagatgcagttttacattaccccagtagcgatcccgtgcattcactatcgcctgcaaacggccgttaatcccggcggcagtcattcgtactcccgccaacggccagcgagcatcattcaagcgtaattctggcgtaatatcaccgtaagcacggagcaacgcaccgggagacaataacagcgtcgggttgagcaccgaaccgctcaatattcccggcaaagtgccattcaatatcagattggacaaattagcctgaccgctaatctggaaacgcagatcgctgtcgatcaaacttaaatgacctgggcctaatgtcagaaccgcgttgcccttgccattttgaccggaggtaattacgttgattcgagcagtaatcaccgcctgatcaaacccttcactccaatcctgtaccgtcagatttacgccgccgctcaacggctgctgagcataaggccactgccaaacgccttgattaatttggatatgtctggcggcaacctgccagggcagcgtaatcagcgctttatctccgcctcgctccgtcagggtcaactctccctgttgctgttgccaatgtaaagccaccagcaagggctgttccatataaggcgttgtgaattcgccggccagttgccctcttgtcggcaacgcgtccaatgacaagggaatacttaatgttccgcttaaccgaagcggttgaacgcttccgggaatagccaaaacaaactgctgtaaatgcagttgttgctgattatccaaagtggcgttaaaacgcaatttatcaccttggtaatcaataacctgaccagcttttgccgtagtgaatgacaacgcgccgccatactgttgccaaggggtgacagaaagattatcaatatgcaggtcgagagaagaaaggcgacgttgccagtcggccagattttgcgacgttgactctgggtcgtccgacgtcaactgactcaagcactcggtatccattgccaatgttttagtctgaattccccaacgcccttctttataagaaagtcgggtatcaccaagatcgactaacggacaggtttttgccagaaaacgcagaccatccacatgtaaggctccgtcacgccaaaccggcgtatgggctaaaatgagttggctaccggctggcaaccaatgggctgcaactttcggtaaccattgaggcaaagttttccataacgcgacgactagaatcacgctggcgaacagtagccaaccgattatttttaggcttttaatcattattggccttgttttatgaactgtgtttcctaaaccgctgcacttagcataacaaatttctgactgctgttattatgtagcataactaaatccctaagtaatatagataatacatcgggagcgccatcactcccttactctaacaaattgtatgatttattaaattctgatactttgatcacaatattttggcggagaaatcatgatgaaattagccatttacagtaccaagcagtatgaccgtaaatatcttgagttggtaaaccagaagtttggctttgaactggagtttttcgattttctgcttagcccgaaaacggcaaaaactgccgtaggctgtcaggcagtttgtctcttcgtcaacgatgacggtagccgtgaagtattaactgaattagccgatatgggcgtgaaaatactggcgctgcgttgcgctggtttcaataacgttgatttagatgcagccaaagagctgggcattaaagtggttcgcgtaccagcctattctccagaggcagtagcggagcatacagtaggcatgatgatgagcctgaatcgccgtattcaccgtgcttatcagcgtacccgcgatgccaacttctctctggaaggtttaatcggttttaatatgcatggccgtaccgccggggtgattggtaccggcaaaatcggcgtagccacaatgcgtattctgaaaggtttcggcatgaatctgctggcctacgatccttaccctagtgatcaggccttggagttaggtgcagaatatgttgatttgaaaacgttgtatgcaaaatctgacgttatttctctgcactgcccgctaacgccagaaaaccatcatctgttaaataaagatgcctttgatcagatgaaaaatggcgtcatgatcatcaataccagccgcggtgctttgattgactctacggcggctattgaagcgctgaagcagcagaaaatcggctctcttggtatggatgtgtatgaaaatgaacgagatttgttctttgaagataaatccaacgacgtgattcaggacgacgtattccgccgtctgtcttcatgtcataacgtactcttcaccggccatcaggcgttcctgaccgaagaggcgttaaccagcatttccgaaactaccatgcaaaatattcagcaactcgaccagggtttaccttgccctaacctattgaacgcataataggttgaatgccatttcgttatttatacagggtgtgttctgcgcaccctgttttatttccagttacctttgtttattgcccctgaactactcgccctcgtcgaatataagtatttccctctgctttgtgctcttgccaacggtgaaataactcaaaaaacattccccttgaccgattaagaatggctgcaattctgataagaaaactcttgttatccctcacttttatcatatagcgcggttaacaaacccagggtttggtatcatatacttaaattaatcaaggtattcgtctgtacggacgacgcaattacctcatcaggagagaacatgaaaaaaattattccattggctatcgcgggaattctattagcgggttgcggtatgaatcagagccaaaatacggctaatcaaattaccgctggggatttacagcatcataatttcgtgttggtgagcgtcgacggtcaatcgccaaaaaatcagcaaggcaatatgccgagcattgagttcggtgaaaaaatgcacatttctggcgcaatgtgtaatcgttttatgggacaaggtgagttgaaagacagcgttcttactgttaaggctttggctggcacgcgcatgatgtgcaacgatcctcagttaaaccaatgggataccttgattggcgaggttctggctagcggtgccaaagtgaccttgaataaaggcgagttaaccctgaataacggcagccacaccttggtttataccagccgcgactgggtaagctaagcctgtattgtgcctcaggtagactatggcaatcgaatttcactgccatagtcttaataacctgtaacttcagaaccgttttattagctcgccggacaggctccgcgcatcaacgcccactcttcgcagcgctttccgtcaggtaactggcacattccgatacttccaccatttagctgtttggctagcgttaatactccccccgcattagcgcagttaaccgatgccggattagacatattgacgtggtggacgctggcgctggttgcctgctgttcaggaatataatcgtcatttgagttgctgctacaggcggctaaaaataatacggcgccggcgaccaaacaagatgatgctttcattgttacgctccagagcataaacagactgtcgaaattacagaagataagcgcccgatatcatatctgagccgttccatcagcgtcgagtgactttatcaatatttgttataatttgaactcagtatatacggtacatatcagaacaattaaatgtagttgttatttacataaccagcttggaaaataaacgcggcctattgagataattattatcgtgtttgacatgcgtagtctcatcgcacaaaaaatataacgggaaaaatcatgattacagacttattgctacgaatagccttggcgggcgcactaggtggattaattggcatcgagcgtcaattacgttctaaagaagcaggcttgcgtactcatattctggtgggcattggtagcgccatgtttatgatcgtttctaaatacggttttgatgatttgctggctctggggcacgtcagctttgaccctagccgcgtggcggcacaggtggttagtggcatgggcttcctcggcgccggtacaattatgattcagaaacagatggtaaaagggctcaccaccgccgccggtatgtgggtgacggccgctattggcctggtcattgggagtggattatacgaaatcggtatttacggcacgttgatgacgctggtggttctggaagtgttccgtcaattgagcaaccgtttgatgggacatcatcattatgtgctgatacggttactgcctgaatcggtgccgacggtcttagtttctttgcagaaaatgcgtattcgccctattaatctttccgtcactcagcgagatagaaacagcgaaaatgcagactgtgaattaaccatggaagtgacattgtcaccaaaaagaagtgccgacaaaatatatcagcaattgctgactatcgagggtgtccatacgctagatattcgttgatgccctttcccccgtacggtatttcctttgttcaataaataaaggaagtaaaactgtgcgggggaatcaaaacaattaatgcattgtggttttagacagcaaattaatcaccaacactccggaaataatcaacgtcatccccaaaatcgccgcccaatccagcttttgctgatacataaaagtcgcggcaaccgagaccagaacaatccccaacccagaccagatagcataggcgatgcctaatggcatagttttaacgacctgagaaagtccccaaaaagcaataccatagccaataacgacaaaaatagacggcaccaaacgagtaaaaccttctgaagcctttaataaagtagttgcgataacttccgccacaatggccatcatcaaatacaaaaatccagtcataatctttttctcatttcaatatcagcatttgagagtaaagtatgccattctcaaatcaatgccggttaaatacacagtggaattaaccgtaattttacatgtattggccacgtcaggttgatttttctgcgacattcacatggctgtaataaatagttttctaattgtaataattattttctgcgataacttaatcccgagcctcccccacagaaatatgcctgtcagcgtcattctattatttttttcctttttttacctacacacaaacacgataagaggcaaaaaatctctctgctagactttccttataacagaagtcagggacagacagttatctccccggtctcagcatgacgagcaatgtaaaggtacaattaatgatcacaactgacggtaacagtgccgtagcctcagtggcttaccgcgccagtgaagttattgctatttatcctatcacgccaagctccacaatggctgaacaggcagacgcctggtctggcgatggtaaagttaatatctggggcgatatacccagagtcgttgaaatgcagtcggaaggcggggccattgccacggttcacggcgcattacaaaccggagcgctgtccacctcattcacctcatcccagggtttactgttaatgattccgaccctgtataagttggccggtgaattaactccattcgttttacacgttgccgctcgcaccgttgcaacccatgcgctgtcaatttttggcgatcattctgacgttatggccgttcgccagaccggttgcgcgatgctgtgcgccagtaacgtgcaggaagcacaagattttgcactgatttctcaaatggcgactctgaatagtcgcattccatttattcatttctttgatggtttccgtacctcccacgaaatcaacaaaattgtttctctcagtgacgatactttacgccaactattgccgcaaaaaggcatagatgagcaccgcagccgggcgctatcaccggatcatcctgtcgtgcgtggcacctccgctaatccggatacctatttccagtcacgagaagccaccaacccttggtacaacgcaacctatcaacatgttgccgaagctatggaagcttttgccgccgcaaccggtcgggaatataaaccatttgaatactacggccacccgcaggcggatcgcgttatcattctaatgggttcagccagtggtacctgcgaggaagtcatagacacgctgttgacgcgcggagagaaagtcggcgttctgaaagttagattattccgccctttctctgcctcacatttactgaatgtgctgcctggctcagccagtaaaatagccgttctggatcgaactaaagaacctggcgcattagccgaaccactgtatctggatgttatgaccgcgttggcggaggcctacagtcgcggtgaacgcccgactttacccaaagttattggcggacgttatggcctatcttcaaaagaattcggccccgattgcgcgttagctattttcaaggaattagcgctggatatgccgcgcccccgctttaccgtgggtatttttgacgatgtgaccggcctgtctctaccattaaccacggaaaccattccccagcgcgccacgcttgaagcgttgttctacggtttgggcagtgacggttcggtttccgccacgaaaaataacatcaaaatcattggcaatagcacttctatgtacgctcagggctattttgtctatgactccaaaaaagcaggcggtctgacggtttcccacctgcgcgttagccccacacccatcaattcagcctatctggtcagccaagcggactttgtcggctgccaccagctccagtttatcgatctctatcaaatggccgagcgcttgaagccgggaggtattttcctgttgaataccccgtttagcgccgacgatatgtggcagcgcttgccgcaggaagttcaggccgtgctgcaccagcgcaacgctcgtttttacgtgattaatgcagcgaaaattgcccgcgaatgcaaattgggcgcgcgcatcaataccgtgatgcaaatggcctttttccatttaacccagatcctgccaaccgatatggcgatgcagcaattacgggatgccattgagcgcagttatagtagcaaaggaactgaaatcgttgaacgcaactggcaggcgctggatgccaccctcgatgcgttaatagaaatcccactggaacctatcgattccagtagcccaatgcgcccaccgattgtctccgatcaggcacctgacttcgttaaaactgtcactgccaccatgctggctggtttaggcgatgccctacctgtttctgcctttccgccggatggcacctggcctgtaggtaccacccaatgggaaaaacgcaatattgcggaaaacattcctctctggcggcccgatctctgtacccagtgtaaccactgtgtggcagcctgccctcattcggctatccgagctaaagtggttcagcctgaggcgatggccggagcaccagacagtctgcaatcccttgatgtaaaagctcgggatatgcgtggtcaaaaatatgtactgcaagtcgccccggaagactgtaccggctgtaatttatgttatgaggtttgccccgccaaagatcgccagaatcctgaggttaaagcgatcaatatggagccacgtctagctcatctggccgaagaaaaatcgcactatgattttttcctcaatctgccagagatcgataaaactcaaatggaacgtatagatatccgcacttcacagttgatttctccgctgtttgagtactccggagcctgttctggctgcggcgaaacaccatatatcaagctattaacccagctgtacggtgacagactgctgattgccaacgccaccggttgttcgtccatttacggtggcaacctacctaccacgccttacaccaccaacgccgacggacgcgggcctgcctgggccaactcgctgtttgaagataacgccgagtttggtttgggtttccgcctgacggttgatcaacaccggcagcgggtattgcgcctgctaaacactctggctccgcagttgccgccagagttggttgaccagttgctcagtgaagctacgccggaagtacgtcgcctgcaagttaaccaattacgcacgttattggcgaatatcgacggtaatgacgccatacagttagccaccgatgcagactatctggtcgataaatccatctggctgataggaggcgatggttgggcctacgacattggtttcggtggcctggatcacgtactcagcctgacagagaacgtcaatgtgctggtgctggatacccaatgttactccaataccggtggccagcagtctaaagccaccccgctaggcgcagtcaccaaatttggtgagcacggtaagcgtaaggcacgtaaagatttgggcgtcagtatgatgatgtacggtcatgtttatgtcgcgcaaatctcgttgggagcccagctcaaccaaacggtaaaagccattcaggaagccgaggcctatccagggccatcgctgatcatcgcctacagcccttgcgaggagcacggctacgatctggcctacagccacgaccaaatgaaacagctgacagccaccggattctggccactttatcgcttcgatccgcgccgagccgacgagggaaaagccgctttggcactggattctcgccctccgagcagcgatctcaccgccaccttgctgaaagagcagcgtttccgccgcctcaatacgcaggaacctgaggtggccgcccagctatacgccagcgccgagaaagatctgaagaaacgctatgatttcctcagcctgctcgctggtaaggctgaaaaagcgcctacggagtaatccggcccactgaggttaattcattaagccagtcgaaccaagattgactggcttttttattggcttttgcgagatgtttcgcattagcgaaagcaatgatgtttatttcaacacatcaataacatctatctatcaatagacttgataaactcgttttaaatcaatcatacttacggttcttttgattctaactaaagcactatcatccgtttcatgtttacatttacgactgacaacttgaatcactaaaagggaataaacgtggattttgagacatataagaacaatgttatacaccacgaagttgggcactggtttgtagctaataaattaaaactaaatccgggaaatatagaaatagagataaaaaaatgccactctggattttcgcattctgctacatcgcacattgatttagcgccctcattaaagaacctggctgatgtcaaaacatatttaattaaccggatttgcgtgttatacgcaggcacagcatttcagtctgaacaagaagatagatccgcagatcaaatattagaatgtgaaggtaaagatgattattcaaaactcaatgagttatgtttcgttctcagaggcctaaaccatcctgacaatacccaaaagtgccatgagttagaccaacgtaatgagatagccatagagtgctggggcaaagtgatgaaaatacgatctcattatcataaagaaatacttaaccttactgactatatttcaaataaagtcaaagaaaccgataagaaatatacgttcacttgcaaagaaataaagcaaaagatcaaccgctagtattttgaatgacattggactgactagaacgatgaatcacacgttggcattcggcttcgcaagccttaccgtacgcgccacacctatacatatggtggttattttgtagcgcaaaccggctttgacgactgcacaaatggggcatgataacgctcgacggcttcccgagaatccgttgtatctgctcaacgcaaatgaatagtgatcaaattggtttatagaatgataaactcgcactatagaagctatgtatcaccatgccccaactgaatacgagttatgattaaatgttagaaaaacaagaaattaacaaaaaagaacagtacaacctgaataaattgcagaaaagactacgccgcaatgtgggtcaggctattgccgattttaatatgattgaggaaggcgaccgcattatggtctgcctgtctggcggcaaagacagctacaccatgctggatattttgcagaacctgcaaaaaagcgcgccaattaatttcacgctgattgcggttaatctggatcaaaaacagcctggattccccgaacatattctgccagcctatctggaaaaattgggtgtggaatacaagatcgttgaagaaaacacctacgggattgtgaaagatattattccggaaggtaaaaccacctgttcactgtgctctcgtttacgacgcggcattctttaccgcacggcgacagagctgggagcaacgaagattgcgctgggtcaccatcgtgatgacattctgcaaacgctattcctcaacatgttctacggcggcaagctgaaaggtatgccaccaaaattgatgagtgatgacggaaagcatgtggttatccgcccactggcctactgccgtgagaaagatatcgaacgttttgctgaagcgcgtgaattcccgatcattccgtgcaacctttgcggttcacaaccaaacctacagcgtcaggtcatccgcgatatgctgcgtgattgggataaacagtatccgggccgtatcgaaacgatgtttagtgccacgcaaaatgtagtgccttcacatttaaacgacggttcgctgtttgactttaaaagtattacccacggcagcgaagtgattaatggcggcgatttggctttcgatcgtgaagaattaccgatgcagccggtaggctggcagccagaagaagatgaagaaaacgggaaaccgatgattgagcgtcttaacgtggtagaaattaagtaaaaagccactagttaatgaatacgaatgctcggattcaccgtaatccgggcattttttatgcctgtcgtttttgcgcataaaaaaatgccggtgtctattcaacgccggcatcgtaacaatcaatgtgctatgcagtactacaaaattaaaaatcttacaaatatggagcacaacgcccatcgcttgacgttgcattcacctgcgagatagataatgcctgagcctggtaactcaaatgttgatattgctcaatattgaagggattagcatgtttattaccacctttttcaactatcgctatcttgctgagttataaccatttactgcgttttaaccaccaggcaacagcaagcaccaaagcaactaacatcatgcagaaagcagcaaaaccgaatcgagcttcattaccgggaataccgccgaggttgacgccaaacagcccggttaaaaaggttgtcggcagaaaaaccatggccaacagcgacatggtatacgttcggcggttcatcgcatctgccattaacgaactgatttcatctgccagcactgcggtacgagcaatactagaatctaaatcttccaatcctcgtcctaacctttcggaaatctcctgcattctgcgccgatcgtcatcattcatccacggtagccgctcgctggccagacgcgagaacacatcacgctgtggagccatatagcgccgtaaaacaatcagttgcttgcgtaatagcgccatttgcccgcgcgcgggaacctgctgctctaacaaatcatcttccagatcgatgattttatcgtgtaaatcttcgataaattcattggtgtgatcggtcaacccatcggctatctctaccaaccatctaccgctatccgttgggccagtgccactttgtagatcgttaagaacatcatctatagagtaaatccgtcgatgtcgggtagaaacaataagtttatccgtcatataaacgcggatagtcaccagctgatccgggcgggcatcggcgttaaaattgatgccacgcaaagtgatcatcgttccgtcgcccagccgcgtcacttttggccgcatactgtcgccggacaaaccatctcgcaccacttccggtagcaagggcgtattgcgtagccaatcgatactgtcctgacgggtatagtccaaatgcagccaacacggatgttgagccgttgctacggcgtctggggctatgggcgttacgccacctttaccatcgagttgatacgcgtaaaccgcgtccgaaacctgaagtgcttttccttcgacctcatccacaaccctattctcctcaatcaccgaccttcagcataggaatgattcagtctagccttaacttcttgaagtttaaagccgacaaggcacggataagccagaattggctaagcattagaggggaatgaatcggtttggcggagttgttaggataaaaaatccccgtaaccagattacagggattttatgatactgaataaactaacgatggatattcactgcaaaacgcagatcaatgtttaatgatgtacatcgtttgactgtaggctacatcttccggattggtaatcggataaccttttacccaaggcttaattaagcggccattggtatattgataaataggtgcaatcggcgcctgctcggcgagaatctgctcggctttgttataatcagcattcagcgctttggcattagtttgtttgctggtatccgccatcagtttatcgtaatccgcattattgaatttggctatattcccgctgtgactggatgttaataacgacaggaaggttgacggctcattataatccccaacccaggatgcacgcaccacgtcaaaattgccggtattgcggctatctatataagttttccattcctggttaaccagcttgacatccacgcccagttttttcttccacattgaggcgaccgcaatcgccagtttttggtggttttccgaagtgttatacaacagcgaaagttttaacggattattcgggccatagcccgccgcattcatcaacgctttcgcctgcgcatctaattcagcctgactgtgctgctgtaagaaattatccgtcggcttatatccagccgtcacgtctggggtaaagtgataagctggcttctctccggtacctaatactttttccgcaataattttacgatcgatcgcgtaagacagcgctttacgcacacgaacatcgttggttggcgcccgctgagtattaaacgcgtaataatacgtcccgagctgatccggagtataaacctgcccaggaatatcttttaacagcttctggtacatgtttttcgggaaggactcagtgatatcgatatcaccggcctgataacgtttagtcgcgttggattcctgattaatcggaataaacgtcactttggtcagcaccgtatgggcgtgatcccaataattttcattgggtaccagcaccagtttttcatttaccacgcggtcttgtaatttaaaagcaccgttaccgaccaaattacccactttagtccagttattgccatatttctcaaccgttgctttatgaactgggaacatactgaaatttgccatcaggcttacaaaataaggcactggcttactcagttgaactttaagcgtgtaattatccactgcgctaacgcccaattgatccgccggtaatttaccggcaataatctgttccgcgttatttaaaccagctaattgcgcaaaccaggcaaaaggcgacagatttttgggatcgaccaaacgctgccagctatacacaaaatcattagcagtcaccggatcgccattggaccagcgcgcgtctttacgcagcgtaaatagccagatttgattatctgaagtttgccatttctccgctacgcccggaataactttgccgttggcatcctgattcaccagcccttcaaacaaatctcgcgcgacctgcgcttccggcaaaccaaccgcttttatcggatccaaagaagcaggctcatccttaatatggcgaacaatctcttgtttatcagctaattgtgtacccggcggcacctcagcggcataggccgagccgagggatgccccgaccacagcggcacataatgcataacgaaaatattgcataattgatgaccttatcgttgttaatccatgccataaatgagccacattccactggctctgacttgtcattctcccgtcagcgaaaattcttgatgctgccaggccgggtactcaactaataaatctaacctatcattattttcaaatctattacttattagatatcaatagctaatagtgcggtttatgccaaataatcaccgaatacggcggcgtttgtatcggaagaagttaagtgataatttcatgactgccgaaccaagacatctaaagagaaccccatgacacagcttcgtccccgcccacttcgcggccatttaccaccactaggaaagctctacggcagttcgtttttaggtgccccgctgctttacttccccgctcaaacgccggcggcagataccgggctgattatcgccggtacccacggtgacgaaacggccgcggtcattacgctatcctgcgcgttacgcagcatttctaccgaacaactgcgccaccatgtgattctggcggtcaatccagacggctgtcagctcggtttacgcgccaacgccaacggggtcgatctcaaccggaattttccagctaaaaactggcaatccggcgagacggtttaccgctggaacagtgcggccaccgaacgggacgttttattatcaacaggaagcgaggcgggttcagaattggaaaccaaagcgctatgtcagattattggagaactggctccagcgtgggtcgtttccttccacgagcctttggcctgcattgaagatcctgatagttcaccgctaggtcattggttgtcagaacaatttgatctgccactcttaaccaacgtgggttatgccacgccagggtcattcggcagttggtgtgcagatatttccctgccttgtatcaccgctgagtttcccccgatttcagccgacgccgccagcgagagctatctggcagcgatgattgcccttctcaccagaccctagccttgggattaactggccaactgattaatcgcgccacaggagaaattcaatccttccgcgacgtcgctggccaaccaggttgggccatctaaatcgataaaccgagctacgggtgccaaaggtaacgcggcgcgaatagcccgcgaggtgcatagcatacagcccagcatcatttcaaaacccagggcttttgcctgctcggccagcagtaaagcctcggttaaaccaccgcttttatccagtttgatattgaccatttcatagcgtccaaccaatccctgcaaatcttcacgcgtatgacaactttcatcggcgcaaataggcagcggatgaataaaatgctgcaaagtctcgtctttatccgcaggtaatggctgttccagcatggcaacaccgaggtctgccaataattgacaacgcgcggccaagccttctggttgccaggattcattggcatcaacaattaatatagcctccggcactgcggcacgaatggccactaaccgctccgcaatcagatgatcgtccagtttgatttttaacagctttgcgccctgctgtgacagcaaacgcgcgttgtaagccatggactccggcgtaccgatactgacggtttgcgccattgagatagcatcgagagcctgggtatgactcaattgccacaagttttttcgagtcagcccgcattccagttgccataaagccgaatcaacggcgttacgcgccgcacccgccggcaataattgctgtaacgcatcgcgggaaatgccgtattcgatcgcatcggcaaccaatgccaactgcgccatcacggaagattcactttccccataacgtgggtagggagtacattcacctacgcctcgaatgccattttgctctatttcgaccaccacaaccttggcttcagtacggcttccacgcgaaataacgaacgcggtgtgtaacggccaggattctgggtaaaaacgcatcgttctcataatggctcccaagctatgtgatcgctgaacctaaggaatagcaggctaactcatcaatatatacaattgtttagagaatttcttatatgcaattgcctattgttaccttaaactgaaatccgtgttacatatctgtaaaggaatcttaaatgacacagaccgtacattttcaaggcaatcctgttgccgtagcgggtaaacttccgcaagccggcgagaaagccaaagacttcactttggtcgctaaagatctttctgccgtttctctgagagattttgccggtaaacgcaaagttctgaacatcttccccagcattgataccggtgtttgcgccgcttccgtgcgtaaattcaatcagttggctggcgagcttgagaataccgttgttctttgtatctccgctgaccttccatttgcccaatcacgcttctgcggtgctgaaggcctgagtaacgtagtgactctgtccaccctgcgtggcgctgaattcaaacaagcctatggcgttgaaattgccgaaggtccattagccgaactgaccgcccgtgccgttgtggtgctggatggcaatgacaacgtaatttacagcgaattggtgaatgaaatcactagtgagcctgattacgatgccgcattagccgcgctgaaataatagctcaacgcagatagcaaaacggctgacatcgcgtcagccgtttttttaacgataaacgttatttaacgataaatagcagccattgctgaaataccctctattcttggttcttattcttggctctcttcgttttcatccacggccgggcgacggctgccgctcaatccatattcccgcagcttattggctatcgccgtatgggaaacgcctaagcgtttcgccaatttacgcgtactcggataattacgataaaggcgggttaataccgaacgttcgaaacgcttactaatatcgtccagcgaaccgtccagcacctcatcccccaacgacatctccacttcaaattccggcagaataatgtcctgtgggcgcagttctacgccatctagctgagttaaagcccgataaatggcattcttaagctgacgaacgttacccggccagccgtagcgcgtgaggaatccgttaagttccggtgacaacttcggccgtggtacgccttgctcatcagagaaacgggcgacaaagagttccaccagcggcataatatccgttgggcgctcgcgtaatggaggcagtgtgatggtcagcacgtttaggcgataatagagatcttcgcggaattcaccgcgctgaaccaattccaccaaattcttctgcgtcgcgcagataaccctaacatccacgtggacttcatgctcttctcctacccgacggaaagtgccgtcgttgaggaaacgcagcagtttgatctgcattcgcggcgacatttcaccgatttcatccaacagaaccgagccaccgttagcctgttcaaagaatccttttttaccttccaccgcattgggataggcgcccggcgcatagccaaatagctcgctttctaccacgtcgtcaggcatcgatgcacaattcagaccgaggaaaggttttttgccgcgaggactgcgcaagtggcaagctctggccagcagatctttaccggtaccggtatcaccaattagcaacagcggcgcatccaacatcgccaatttgcgcgcctggtctaaaacctgacgcattttgctgctcacggcgacaatttgtctgaattcgctgtcatcgttaaccgacagggtttgcaattgctgccccatacgcgcggtcgatttcagcatcaccaccgcacctaccgtttggttatgctgattttcatccaccaaatgaataggtgtcacttccatcaggtaatcctgactgtgaatcagtattcgttcggtatgaggcgtggtttcttcccgctcaaaccagtgggaaaaattaaatccccccagcagcgtacccatagtcttatgacgaattttctcttcgttaaaagaaaatagctcgcgagccgccgggttagccagttcaacgttgcctttaagatcgatggaaaaaacaggctccggcatggattccagcaaggcgcgcagcgcgcggtgctcacgctcagaaggcatgaaaggaacggtgcgcacgtcggtaaccccgtcgatacgccgaatttccgccatcagcgcctgaaacacggcaaaatccagtttggagaaattcagataaatacggccgataggatcaatttcgatcccccgtaaatcaatgctgcgtaaaaccaggagatcgagtaactctctggtgagacctatccggtcttcgcaaaacacttccaagcgcatcagtattgaccttatctttgcggtacgggatgactaagtttgataataccctgtcccttcgccctgatgaagagatctgtcagcaaaagttgacaggaatcctctttttcgtttcatttgtcttcatttggtcttttttatagcgatatgaaggcattatccccgtcgttgttgaagaatctcagggtgatattatcttcaaaatcaattatgcagatgaatataatatattcgtagaagcggccgtcctgtcaagcacaggtgacactttgcaatcaatacgccaactggctatagtaaaggtagccagttgaccgaggaggttgcatgagaagttaccacccaagcccgaccactagagtcagcgcgttatggcgtgaaatcgggctgcccgccagccgcggcaccgcgttggtagacagtattaagctcggtttttccgtcgacgttattgatacgatccatctgtgggcagcgatgccaaaggccgaaatcttgcgtgccaccggtattcccagccgcagcctgacacgccgtcgcactaatgatggacgatttactccagaagaaagtgaacgtattgctcgttttgtccgagttatggacgcggcggtagatttgttcggcggagatcgccccaaggccacggcatggatgtcaacgcctgtgagaggtttgggcaatcgcactcccgattccctgctggaaaccgaaaccggagcgttggaaatatgtgacctgattggtcgattggaacatggcgtctttacgtaatggagctacagttttgatgctataccggattgtccataatcgttttgccgctacggcctggtcgggttatggagcggaaacctacggtggtcgctggaatcataaaggccacagcgcgatttatctggccagcagtatttctctagcaatgttggaaacactggttcatgttgaagatagcgccactctgaacgattttaatctgtttcaaatcgcgattccggataacgctattatggccttgcaacaggaagattggcctcgaggatggcgagacgatccggctccggtggcgacgatggatatcggcacggaatggttaagctcagtttcctccgtgggattactggttccatctacgttggtgccgctggagagaaatgtgctggttaatcccaaacatcgtgatttccccccttgtctcaccagcgtcaccccactcgacttcagtttcgacccgcgcctcaaatagcccgaaataaatggccttagcgctgtttgtctttcttaggcagcgtattcttcagctgcgtaatcaattgacgacggaaatcccccagttttggcttatcatcatccatccagggcagcgggcgacataactccatcgctttgatccccaaacgcgcggtgagtaaacccgcaccgattccctgcgccgcccgagcggataaacgcgcggccagatcctgcgatagccagtccataccgacttcccgcactaattccgacgcaccggcaaaggcaatattcagtaaaaccaaacggaacaggcgtaaacgactgaaatagccaagttcaattccatacaacgcggcaatacgattgattaatcgaatgtttcgccaagcgataaaagccatatccaccagcgccagagggctgacggcgatcatcagcgccgattctgccgcatagcggcttatttcagatcgagcctgattatccaacgtcggttgtactaatttggcatagagttcaaccacttcccgatcgttatgcgtttcatgcagcgaggcttgccagcgctgtaacgccggatgtccctgatccaaacccgcctgacgcgccagtttctcgcagaattggcgcccacggcccaaaccgtggcttaccagtaactcccgcgccacgtcacgttcttccgcgcgctggcgcagccgatataaccgccgccattcggtaacaaccgaaccaatcccggcaaaaacgatcagtccgccggctaccgtggtgcccaaggctatccagtcctgctgctgccacgcctgattaacccactgcaccgcctgcgccacgacgctcacgccaaacagcatcagacctgccgtcaccatttttcgccatagactgcgttttggtttaagcgccgcgcttaccagaccttccgcacgcccttccgcttcgtccgcgtccagaaccggatcaaccggcaaaaaattctcggccgcggagccactaaaggtctgccccgtttttaactttggctcttcgatcggctgcaatggctgttgaaaatctatccgtggtttcaatggttcattcatcgcagtttatctcccaataaaaactccatcaccgcatccagtcggatatgcggcaatgggctatccacgtgcacttgttgtggacggaactgatcaaaatggaagccctgttgcagccaaaatgccgggccgggcaaacgtgccggaacatcgccagggaacaccgtcagcggcgcaccgtcttccagacgatgaccttttaatgccggaattcgctggccattatgatcgaccataccgctttccgtggcctgtaccgacgccagcccgacacaatccatgctgatgccttcgaacgccgcattttgccaggcctcctgcactaattgctggagcaatgacaccagattggcatgttggtccgcagttacatgatcggctttagtggcagcgaacatcagcttatcaatacagggggagaataaacgacgaaatagcgtgcgttttccataatgaaagctttgcataagctgggttaatgccagacgcatgtcgttaaaggcttgcggcccgctgttcaagggttgcaggcaatccaccaggacgatctgtcgatcaaaccgaataaagtgttctttataaaaaccttttacgattgattggcagtagtaattaaaccgcgcgcgcaacatacccaaattgctgtgtttgtctgcctgagctaaacgagactcatcaatcgcggtgatatctggccaagggaagaactgcaatgcaggcgcgccggccatatcaccggggagcacaaagcgccccggctgaataaagtgcagcccttcttgcttacagcgaatcaggtactcggtataggcctgagcaatcgcggcaagtaaattttcgtccgccggagccaaaggatcgcactgtttgcacaattccaaccacggtttagcccattcggcacggttaccctgtaacaaaccgcccatttgccgcgaccattcgaggtaatcctgctccaacatgggcaaatccagcagccattcacctgggtaatcgacgatttccagatacaaggtcgatgtctctttgaaatgacgtaaaaccgagtcattcgacctaaatttcagagccagacgaatttcactcacgccgcgagtcggcgtcggccagctcgggggcgtaccgtacaatgaggccagaccttcgtcatatctaaaacgctggatacccaaatcccgctgaggcacccgcttgacgccgagtaagcgatcttcgcgcacggcagaaaacagcggtaaacgcgccccgctgtgtacatgtaataattgattgactaacgcggtgataaacgcagttttaccgctccgactcaggccggtcaccgccagtcgcaaatggcggtccatcccgcggttaactaaagagctgatctcattttgcagtcgtttcatgcttttcctttgcaaatcggccaaataccgcacctaaaccgcgtctcaataacggttccaacaacacagccagcgcccaacgcagcggtttacggctcacgctgcgtaaaatccaggccgtggcaccggccgggccgtagcttaatgctgcggtaataatcactttaaccagcgttttcaatactacacctgaccgctgagtggcgacgttattcttcatcatttatgccctccggcaggtcatttttcgaatttcagctcggtaaaagtcataaatcagcccactggccgcatgaattaccgattcattgcgctgcggattcgttatagctgacgaaatctgctgcgaacaccaaaagtttccgaagtaacgtaacgctctacttgccgcaaacgttgctctccgctgcttaattcgtaatccagtttatccagcagttggcgaggagtttgatagtcctcatccataagagtgctggccggtactgggtccaacatataagtcagcaccaggtaggctacgatggtgaaaacaaacaggccgaaaaacatcgataacacggcaataatacgtaccagtttgaccggaatatccagataatgcgctaaaccggcgcacacccctttcaccatgccttcttccggcacgcggtacagtttttttccactaaacaaaccggtcattatgattgcctccagttcggatgttctgcatccagaatttcttccagcgcctgaatacgttcgcgcatacggcgcgcatcatcagctaactgcgctaaacgctgcatttcctgatggctaagctgggtgccgctttgttggcgattgctgtaatgtagccagagccagatcggtgcgacaaacagcacaaaaatggttagcggaatagctaaaaacagaatactcattctttccccttatttattcttatcaacggcaatgcaatcatcatagccgcaagattcgagtaataatatggccgcaaccttttgggataacggcccacttttattactctttattattctggagcattcatttttgcttttaacgccgctaactgactgctgatttcatcatcggctttcaattctgcaaactcttgttccagtgacttctttttaccgatgctgacgctttccgcttcggcttccatatgatcaattcggcgttcgaattgctcaaaacgagccattgcctcatccagcttaccgctatccaactggcgacgaacatcgcgagaagaagaggcagcctgatgacgtaaagtcagcgcttgctgtctggcgcgggtttcggtcagtttgctttccagctcgccaatctcatgtttcatgcgatccagcgtttcgtctacggtagccacttcacgctgtagggtttcgatcagggaagccactttctgtttctcaatcaaagcggcacgagccaagtcttctttatctttacgcagcgccaactcggccttttcctgccattcaaccagctggctttcacccaaatcaatccggcgcattagctgtttcttttccgccaacgcgcgagcagaggtagagcgaatttctaccagcgtatcttccatttcctgaatcatcaggcgaaccagtttttgcggatcttcggctttatctagcaacgtgttgatgttggcattcacgatatcggcaaaacgagaaaaaatacccattgttcacatcctctttaatcatgtgggcgactctatgcgccggttgttcagtgagcaagtctcaccggtacagatacagctctggctataggataatcaaaagtcatgccaactttagaaaatcaaatatcatcatgaattaaaagggaaaataactttattgctaatttcagcataaaaggtagagtgattactttaaccaactattagcgaatctcactatgagcgaacaacttgaaaacctgctaggtgaagcaaattcctttgttgaggtgcttgagcaagtctcgggattggccaaattgaataaacccgtactggtgattggcgaacgcggaacgggtaaggaattgattgctcaccgtttgcattatctgtcgaatcgttggcaggggccgtttatctcgctgaactgtgcggcgctgaatgaaaatctgctggattccgagctgtttggtcatgaagccggtgcctttaccggcgcgcaaaagcgccatttaggtcgatttgaacgcgccgatgggggaacgctgtttctcgatgaactcgctaccgccccaatgctggtacaggaaaaactgctgcgagtcattgaatatggccatttggagagagtcggcggtagccagccgttacaggttgacgtgcgtttagtttgcgccaccaatgataatttacccgctctggccgccgcaggaaagtttcgggcggatttactggatcgtctggctttcgacgtggtgcaactgccgccgctacgccagagacagcaagatatcatgctgctggcggagcatttcgctatccaaatgtgccgcgaacttgggctgcaattattccccggttttactctacaggccaaaagccagctgctgggttatcattggccgggaaacgtgcgagagctgaaaaatgtggtggagcgctcggtttatcgccacggcgatagcccggatctgctagacactataattatcaacccgtttgctgcccatcagaatacccaaccccaccttccaacggaaacggcttccctgcccgcgctccccgttgacctcaaagcctggctacaaaacggcgagaaacagttaattatgcaagcgctggagcaggcgcgtttcaatcagaggaaggcggcggatttattagggctgacctatcatcagttacggggaatgctgaaaaaacactcgatattgcaagccgccacagatgagaataacgaagaatcggcgaatgactagctagcgaccataatttttcgcttatttattttcgcttatttatatcaggcagaatgatataaaacagggctaatgacgtggaaatccgaggcataaaagatgcgaataagctgaaaagttaatcgcaagtaaaaaaaaaagccagcacccgagctggcttaaaaaacactggaagcaatgtgagcaatgtcgtgcctttctatcagaagctccctactggcggcctcttcctgaagtgcgaaacaatgataatggttatcactagcacttgtaaatacttttgttgagaatttttctcatttccacaacgatattgtggctcttcaattatcctcttcacgttatgttttaacctaatccgatacccctattctctgtctggaatcctgtctgcttcaaggtaacggccgaaatggattaacactcaaatttatcgatcgttattctgcctaagcgtagccagacacagtaacgtgaatagaatctgcgccccaagattcgccgtattactggtaggatcatactgcggcgcgacctcaacgatatctccaccaaccatgttgacgccggccaaccctcttaacatgccaaataattctcgcggcagtaacccattgacctccggcgttccggtgcccggagcaaaactgggatcgagagaatcaatatctacgctaatataaaccggcccagtccctacaacggttttcacttgctcaacgatagagtgaacgccacgctcaaaaacggcttccgcatggatcactgtcatgcctgaatcgcgagagaactcccaaaaatactcatccgggccacgaattccaacttgcaccgtgcggcaaggatctatcacaccgtctaataccgcctgacgaaacagcgaaccgtgatgctgattgccgtaaaaaagaccggcggtatcacaatgagcgtcaaaatgaatcacaccaaccggccgctctgcccccaaagcccgcaaaattggcagcgtcatggaatgatcgcctcccactgacagtggcaaaatgcctgacgctttcaggcgagatagcgtattttgtatatccaaatgggcttgcgtgaggtcaaaacggttgctaaacaccacgtcgcccagatcggcggcgctaagtaaccgagctggcgcaagattcagcacatgatcgtaaggcccgatacgttccgcaacgcgcagcgctttagggccaaaacgcgcaccagcgcgatgcgtcacgccgagatccatgggaacgcccaaaattccaacgtcggttccctgccattgatccggcgaacggaacggtaaatcgagaaaagtggaaatatggtcaaacgcccatgtagcctgcgccttagcatcagggaagaaggtttctgccacctgacgataattttcatcatgaatggtaaaagcgtcttttcccgcatacttcgcccgcaatttattgagtgagttcatatttaaccggcctcctgtttcacagcgtccgagcaggaataaaactcgaagcgatttgcggattctgccagcactgccagtaaatgctgtacctgatcgggattattggccgcggtgagctgcacgcggaaaccgacttcttttttgggtaccagcggatatagcgccagcgtgacataaactccgcgctcaaacagataactgcctaacgccataatttgccgtggatctttcagcggtatttccatgataggtaattcagaattattcaatgtaaaaatatcaagatcggctaaccctttgagcaattgtcgacacatttgatgcagatcgcgacgtaattcctctcctttttgggcgttaaccgctaaaccactcagtgttgtggccagcgaagctaccggggatggccccgaatacagataaggcgacgcggcaactttaatcatttccttcaataccgtcggcagcgccataaaagccaacaatgatgaataggatttggataaacccgccaccagcagaatattgtcgtagctcaacccacagtggcgaacgataccgttccctttatacccccacggcatttctccatcgggattttcacctatcaaaccaaaaccgtgggcgtcatccacataaaggatgacgttccagcgccgggctatctcggcaaaacgcgctaaatccggcagattgccggtcatgctattcaccccgtccatgcaaattaagcgcggcggcacggggctactagctaataatcgttctaattcatcggcatcgttatgtttaaagcgaatcagcgtagcaccttgcccctgcgccactttacaaccgtcgtaaatggttttatgggcccgactgtccagataaattgcgccagtaccgctgaggaaaggaatcactgaaagatggatatgagtgatagtcggaaaggccaatatatccggcgcttgggtcaaggccgctaactcgcgctctatatccctataaggcgtgggtgtaccaagcattctcgaccagctcggatgagtaccccattgacgcaccagaggtaatattgacgcctgaacctgcggatttagatccaaacccagatagttacaggaggcaaaatcaatcagttcacgttcgccaatcactatcttgcgtccgtcaataccctcaataacggcatcaaccatagggtgagcgggaggtgtaagtggagaatgagcgaaatgtgtgtccaaccatttcgccatccaggatgggacggtttgctgattcatcattaattcctatagtgatgcgttcagaattattcaccttgatacgatgagagtgcccactagtattgtgataaccaaaaactataggaaaggacggtaaaagcagcaattgctcaattatcgtgcaacgtaaagctagaatgacacaatgagtaatggggttataattgctgttatttccccccaatcggtataaacacaagagccgcgaacgatggcacgatttgcgatcgagctgtagccgcctctggtcactgcggccccacgtctagaatgaatcaccatgccatcctgaatgttagaatgcgcaccgatctgatctgaggtcactggccgaaaggatttttacgccgcatgattaataccctcgctactgataacggcgacggcgttgtgggcatgcaggctttcctgatgctccaccctaactgaaaatgccgaatagcggcattgcttacgcagcatggcgtacaaacggcgcgccgcgtcctcgcagaacatcagattttgtccattagccaatgcaaacgcctgctcatcctgacgtttcactaaagtttgtaccggtgttcccagcgtattttcaatttggttaattaattccagtaccggaaaattcatctcagtggatttaagtgacaccgtcactcttgcccagctgcgttgactgtgcggcgttgctggcattccctgcgttccaagccaatccagcacctgttgctgggtcagattttcctgctgttcaaaatccagttgaaactgctgctgagcagactgaatactcaacgctaccgagctgggacaagtggaagaataaggtacggacagagatagccggagccggagctgaagctgttgttcgagctgggcgtcaatcgtcagtgggtaggccttccagcctctttgcggggataacatcgccggtcgcgagataaaaatatcgctggcaatatgcaggctagcgctggcggctagatcgggttgagaagctaaaaatgcggctaacgtggtgtgaatgcgctggggcgttaattccccttgagtcaattcatctaatgccaagtatatacgggacatatgaattcccttgctctgccctttagctttgacaccaatcccggcattcacttttgcagatagcggcctgccaacgatgtctaacggtaacgcaatgccttccatgccgacccaatccagctccgtattgccaaaatcaatgtatgaagattgtacatctggtaacgccgttagcgattgattcgcagctattttcatgtcgtcctctatgtgtgctttattaatatcaaataaaggtaacatgcaattgttatagtataacatatcgaagttgcgtttttttgctctctttcggcgcttttgcgcataattacagcaatatccctgagatcagtgagttgttttgctcaatggattggggggataaccagtttacggtacactaagtctattgcttacttacagttgaagcgttttatgcgtggtttactcatttggctgctgtcgcttggctgtctagcgacaccagcgctggcacaaactcagccagccccccaagcgattcaaccgccgccggatatccgccagcggggtttcgtctattgcgtcagtggcgtgttgaatactttcaacccacagatggccagcggtggcttaaccatcgatacgttagcggcacagctttacgatcgcctgctagacgttgacccttatacctatcgtttggtgccggagcttgctgatagctggcaagtactggacaacggtgctacttaccgtttccatttgcgtaaagatgtgcctttccaaaccaccgagtggtttaagccgacgcgcatgatgaacgccgacgacgttgtctttagcttccaacgggtatttgaccaaaaccatccgtaccacaacgttaacggcggggattatccctactttgatagcctgcaatttgccgacgcagtacagagcgtgaaaaaactggatgattacacggtagaattccgcctaaaagcgccagatgcctctttcctgtggcatttagccacccattacgcgccggtgctttccgctgaatacggcgatatgctggctgccaaaggcaaaaaagagcagattgaccgcgaacccttaggtaccggaccatttatgctcaatgagtatcgttctggtcaatatattcggctttctcgaaacagtaattattggaagggcttgccgcgtatgccgcaggtcattatcgatctgggcgctggtggcaccggtcgcttgtctaaattactgaccggcgaatgtgacgtactggcctatccggcggccagtcagttgtccattttgcgagatgacccgcgtttacgcctgacactgcgaccgggcatgaatatcgcctatttggcatttaatacccgtaaaccgccgttgaacgatgaacgcgttcgtcaggccgtcgctttgtcgattaataatcaacggctgatgcagtcgatttattacggcaccgcagaaaccgccgcatcgattctgccgcgcgcctcctgggcttacgataaccacgcgcaggtaaccgaatacaatcccggcaaagccagagaaatactgaaagagttggggatcaaacagttacagctgaatctgtgggtgccaactgcttcgcagtcttataatcccagcccgttaaaaaccgccgaactgatacaggcggatttggcgcaggttggcattactgtgaatatcgtgccggtggagggacgttttcaggaagcgcggttgatggaaatgaaccatgacctcacgctcaccgggtggtcaacggacagtaatgatcccgacagtttcttccgcccgttattaagctgcgctgcaatacgctcgcaaaccaactatgctcactggtgtgacccagctttcgatgaattactgcaaaaagctctgcgatcgcagcagatatcggaacgcattgactattaccaacaggcgcagcgcattttggagcaacagttgccactgctgcctctggcttcctccttgcggctacaggcgtatcgttacgacatcaaaggtctggtgctcagtccctttggcaatgcgtcctttgccggggtgttccgcgaaagtgacgagggtaaaaaaccatgattatctttaccttacgtcgcctgttgttattagttatcacgctaatcatgctgtcgctggtgagttttagtctgagctattttacgccccacggcccattgagcggcgcttccctgttcgatgcctaccgtttttatttgcatagcctgatgcaatgggattttggcgtttccagcattaacggccagccgattagcgaacagctgcgggaagcttttcccgccacgatggaactctgcgtattagcattcagcctcgcgctattcatcggtattcctttgggtattattgccggtgtaatgcgaggaaaatggccggatgtcgctatcagttctctggcactgatcggtttttccatccccgtattctggctggcgctgctgctgatgctttttttctctctgcatctgggctggctgccggtctccgggcgtttcgatctgttatatcaggtcaaacccgtgactgggctggcactggtagatgcctggctatccaattccccttatcgcaaggaaatgatatatagcgccttgcagcatatgatcctgccgataaccgcgctggccgtggcgccaaccacggaagtcattcgtttgatgcgcatcagtaccgatgatgtgatagggcaaaattatatcaaagccgctgcgacccgcgggctgtcgcggctgaccattattcgtcgtcatgtgctgcacaacgccctgccgccgattattcccaaattgggcttgcagttctccaccatgttgacgctggctatgattaccgaagtggtattcagctggccggggctgggacgctggttgattaacgccatccgtcagcaagattatgcggcgatttctgctggcgtaatggtggtgggaacgttggtgatcgtgattaacgtgttgtcggatattttgggggcgatgatgagcccgttaaagcataaggaatggtatgcccttcgataatgtctaccgcgaaaagaaaatgcctagccccctgctgtatacctggcgcattttctacgccgacactttggcaatgaccggattttatggggttattgccctgattttgctgtgcctgtttggcaatatgctggcaccctatgctttggatcagcaatttctcggctatcaattgctaccgccgtcctggtctcgctacgggaatgtttccttcttcctcggcaccgacgatctcggccgcgatattcttagccgtttattgaccggcgcagcctccacctatggttcagcgctgctagtgaccgttgccgccgccctgtgcggcgtggtgttaggcgtgctggcgggcgtcactcacggttttcgctccgcgattttgaatcatatattagataccctgctttctattccgtctctactgctggcgatcattgtggtggccttcgttggcccaagcctgcaacacgccatgtttgcggtctggttagcattgctgccgagaatggttagaacgatttacagcgcagttcatgatgagctggataaagaatacgtggttgcggcgcggctggacggcgcttcaacgccttatattttgctgtatgccattttccccaatattgccgccgtgctggtgaccgagtttacccgcgccctctcgatggcgattctggatattgccgctctgggctttttggatctcggcgcgcagttaccttcgccagaatggggcgccatgctgggggattcgctggatttggtctacgttgcaccttggaccgtgatgttaccgggcgcggcgattttggtgagtgtgctattggttaacctgttaggtgacggtatgcgccgggcgattatcgagggagtggaataatgccgttactggatatccgcaatctcactattgaatttatgaccgccgaagggccggtaaaagccgtcgatcgcgtcagcatgaccttgacagaaggcgaagttcgcggcttagtcggcgaatcaggatcgggaaaaagcttgattgccaaagcaatttgcggcgtgagcaaagataattggcgaatcaccgccgaccgcttccgctttgatgatatcgacttgctccagctcagcccacaccaacggcgtaaggtgatcggccataatatttcgatgatttttcaagaaccacagtcctgcctggatccttcggaaaatatcggtaagcagctcattcaggccattccgggttggacctataaaggccgctggtggcaacgatttcattggcgtaaacgccgggctatcgagctgttacaccgcgtcggaattaaagatcacaaagacattatgcgcagttatccctacgaattaaccgaaggggaatgccaaaaagtgatgatttctattgcgctggccaatcagccacggttattgattgccgatgagccgaccaacgccatggaacccactacgcaggcgcagattttccgattgctggcacgattgaatcagaataacaacacgaccattttgctgatcagtcatgatttacaaatgatgagtaaatgggcaaaccgggtaaacgtactttactgtgggcaaacggtggaaagtgcagtctgcgaagaattactggccgccccgcaccatccttatactcaggcgctgatccgcgccatgccggattttggccgctctttgccccataaaagccgtttgaataccttgcccggcgcgattccctcgctggaacatctgcctatcggctgccgcttggggccgcgttgcccttacgcgcaaaaaacctgtattgaaaccccgcgtctgcggatggcaaaaactcacgcctatgcctgccacttcccactgaatctggaggaaccgtgatgaccgaaaccttgcttgaagtgcgcaatctgagcaaaaccttccgctatcgcaccggcctgtttcgtcgtcaacacgttgaagcggtgaaatccgtcagttttaccctgcgggaaggccagacgctggcggtcatcggtgagaacggctccggtaaatctacgctggcgaaaatgctgtccggtatgattgaaccaaccgaaggcgagctgctcatcgacgatcatcgattaagctacggtgattacgcttatcgtagccaacgaattcgcatgatttttcaggatcccagtacctcgctgaatccccgtcagcggatcggccagttgctggatgcaccgctgaaactgaataccgatctggacgccaacgcccgtgaacagcgtatttatcaaacgttgcggcaggtcggtttgttgccagatcacgctaactattacccgcatatgttggcctccgggcagaaacagcgtatcgctctggctcgtgccctgattttacagccgaaagtgatagtggcggacgaagccttggcgtcgctggatatgtccatgcgctcacaaattatcaacctgatgctggaattgcaggacaaacatggcatagcgtatatctacgtgacgcagcatttgggcatgatgaagcacatcagcgatcaggtgattgtgatgcatgaaggcgaaatcgttgaacgtggcagcaccgccgaagtgctagccgccccgctacacgatttgaccaagcgcctgattgccagccactttggcgaggcgctcaccgccgatgcctggcgacgtgacggcgggcgcttttaggcgtccccactgctcggagcagtggaaaagcaccatattcagtccgggcgtgatagaatcgctcggtttattaacgcaaaacgcgctggttaagtcgatgtttcaacaaattgttttaatattcgtcaccactcgcgtcagcacgcaacaatgaccacaaggattactgctatgggttttctaaccggcaaacgcattctgattactggcgtcgccagcaaactgtctattgcctacggtattgcacaagcaatgcaccgcgaaggcgctgaactggctttcacctatcagaacgagaaacttaaatcccgcgttgaaggctttgcggcagagctgggttctaccctgatcctgccttgtgatgtagctgaagatgccagcatcgacgccatgtttgctgaactgggaaaagcctggcctaagtttgatggtttcgttcactctatcggttttgctccggcagaccagttagatggcgactatgttaacgccgtgacccgtgaaggtttcggtattgctcatgacatcagctcttacagcttcgtggcgatggccaaggcttgccgttctatgctgaacccgaattccgcgctgttgaccctgtcttatctgggcgctgagcgtgcgatccctaactacaacgttatgggtctggcgaaagcctctctggaagcgaacgtgcgctacatggctaacgctatgggtcctgaaggcgttcgcgttaacggtatctctgctggcccaatccgtactctggcggcatctggtatcaaagatttccgtaaaatgctggctcactgcgaagccgtaacccccatccgtcgcaccgtaaccaccgaagacgtgggtaactccgccgctttcctgtgttccgatctggcggctggcgtttccggtgaaatcctgcacgttgacggcggtttcagcatcgctgcgatgaacgaactggaattgaaataacccgcagcggatttattcgctcaaggttatccgaatccgctgcctcatcgcagcggattttttttggcttcgatgagttctttgctcagattaattccatcaattaatcgttttttggcaaagttatggccatttttgttatatcaatccatatgttattacttttggttatggaatatggtttaacattattttatctcactaatccgatcggcaatgatatccactgcgtttacctcatcgaaccacaggatatcttaccgatgtcgatgccaactccggtcttctgctatttatccggcaacggcttagctggcaacgttcatttgttgttcttctgtgtttgctcaattgattcggctacagcccctgctgttgctgccgtttttatcagtaaaacaaggagatcttcatggtgcagtttcgacgtcaggataatgcccactggtatcacgagactcaacgtagcgtaacagacgacgcattacgggagggcgtttgtaccagcggccattacggacacgatgatttctcggccttaagcaatagtgagaatctggctaatgctttttctgataaaagccctttcttattgggattagaagcgcaggtcaatccggacttacaggatttgttacagcagcgcgacgaaacgctacgagcctcgcaccgcatgtatcaaacgctgttcccaccccaggtttccctctctaccgagctgactctgtctctctacgatcgtttaagcagcgccttaatcgtggctcaggtcaccggtgttcaacgtttgtgtaatcactatgccgaacgtctgatgccgttatccagcgatgacgcatcgcgagaaagcaatattcgcctcacgctactcacccagtacgcccggcagttagccagtcagccgacgctgataaaccgccgcgcattgcagcagctcagcgattctgggctaacatcactggatattattctcttctcgcaaattattggcttcgtcggctatcaggcgcgagccgtcgcggcagtttctgcgttagcgggttatcccacggtgctgttgcccggttttcctcgaatggaagatgcggaaagcgcgaattttagtgatgaagtgacgggctggcaggcctggctgccggatctgtctttagaaacggaatcgcaggaacaggaacaaaacctgaccttaaccgatgtgttaaaccagcatcctcatagccagcaggtttacgctgatattcttttgcgcatacgggttcccgaccatcacccgcagccggcgttactggaattggcggctctggtcagtgcgcgaatcaacggcagcgcctgttgcctggttcaccatcgtcagcgctacttgcaattaaaaccagacattactctcatcaataaattacagtcaggcattagccagaatttgagccaaagttcgacggaatcagtggaaagctcggtgattcatctagcggcggaactcacccgcgcgccggaaaggtttggtccgccgatactggctccgttgcaagagcgcggtttttcaccgctgcaactgatggacaccttattcagcgtagcgctagcaggctggaccaatcgattagtacaaacattggggtcgcctcgcggcgcattgcagcaggcctggaccgattaaaccggtgccaaccactctctggcggcgtcaaagaaatgctgagccaacggcgtcacgcgccccggctcggcaaccaccacggccgcacggcgactcatactgacaatattcaccggccgtcgcatcagcgccggtgacatatcctccaacaagcttccacgtggaaacaatccgcagcctaaaccgacgaagatcccctgtaataactgaaatattgaggtagtttccaagcgcgcatgcagagagaaacccgcgtcgcgaaagctgttatccagataacgacggaaataacgcgtcggctccgctagacacagtggtaattccgcgacctgagccagtgacaatggagtttcatccaccaaatcagggaagtgctgagggtgaaaaatcaaatctacaccgctgtcttccaaaggctgagactgaaaatgcagctcattcagcgtggaaagctcgaaaaaacctattcccacatccactgagtgaccggttaacgcctccaatagctgatcggcactcagtaccgaaacccgataatccaactgcggatagcgctcgctgacccttttaagcaaatctgacagggaaatgctgcactgcggcaccacgccaatccgcagagtcccgttcaaaccgtgtttgagagactcaacttccagcttcaacccttgataaaccgaaacaatctcccgcgcccaggccagcacgcgttccccttctggagtaaaaccttcgaaattattgccccgattgatcagcgaaacacccagttctcgttccagatttttcaggcgcatcgacaaagtcggctgactgacaaaactggcctcggctgcccgcccaaaatgacgagcctgttccagattgcacaaatagatcagttgtttgatatccattactgcgctcaatatcgcgttatttattccagtatatcattttgctcccctatctcagcggcctgaggcggttttgcagcaaagcctgtctgaactgcgctatccgcgctcagcgactctttctacacttgctcaatccaatcaagcagctctcacccaacattaaaaaccatttggcagacaaataagactttctgcaatttttagccgatttgtgaagttcatggcgattaacccggtcaaaaagatgggtttcaggctgagagtcaggaacagagagtttgcaagacaaaattttacttaaatttgataactggatcacatttcgttatcaggttaaccgcattctgttgcataacaattcactcaattttggataattatggaaaatcctgtatatgcacaacatttagcgggtcatttaaccatgtacaatgtgatgagctattgatgagccaaatagcagaatatatcactaaataaaatccgctcagcttttaatcaaaataaaaaatcggtaaaccgcgaaaacataaacgttaatactgcataacatttgtaacatgggtttattcccctgcctcgcttatatgtaacagagtattacaaagcgcttgtctcattgacaaagatagtgaacattaaccgccgccattcatcttataacaacgcaaaaggatgccgttccgcgcatcacatttgcaaattcctgtcattttatggccggtagtaaaaattagaggtccctgtgacaactgcaaacaacaacagcaacgaacctgaaagcatcagtatgaatgctttcaaacagccgaaagctttttacctaatattctccatcgaactttgggaacgtttcggttactacggcctacaagggatcatggccgtctatctggtgaaaatgctcgggatgagcgaagccgattctatcaccctgttctcatcattcagcgcactggtctatggcttcgtcgccatcggcggttggctgggtgataaagtgctcggcgcaaaacgcgttatcgtgttaggcgcgctgacgctggccgtgggttacaccatggtggcctattctggacacgatattacttgggtgtatatcggcatggcgaccatcgccgtaggtaatggtttgtttaaagccaacccgtcctccctgctttcaacctgctataacaaagacgacccgcgtttggacggtgcattcaccatgtactatatgtccgtcaacatcggttcgttcttctccatgttggccactccgtggttagcagcaaaatacggttggagcgtggcattctctctgagcgtggtcggtatgttgatcaccttggtgaacttctggttctgccgtaagtgggtgaaaaaccaaggttctaaaccagatttcgcgccactgcatttcagaaaactgcttatggtgctgattggtgtggttgcgctagtgacgctgtctacctggttgctgcacaaccaaatcgtggctcgctgggcgctggcgctggtttccctaggtatcattattatcttcgccaaagaaaccttctctctgcacggtactgctcgtcgtaagatgatcgttgctttcctgctgatgctggaagccgtggtgttcttcgtgctgtacagccagatgccaacttccctgaacttcttcgcgattcataacgttgagcattccatttttggcctggcgtttgaacctgaacagtatcaggctctgaacccgttctggattatggttgccagcccgattttggcggcgatctataacaaaatgggcgacaagttaccgatgccgcacaaattcgcctttggtatgatgctgtgctccgcagccttcctggttctgccttggggcgccagttttgccaacgaacacggcattgtgtcagttaactggttgattctgagctacgccctgcaaagtatcggtgagctgatgatttcaggtctgggcctggcgatggttgcacaattggttccgcaacgtctgatgggcttcatcatgggttcatggttcctgaccaccgccgctgccgcactgatcgccggtaaagttgccgcgctgacagcggtgccaagcgatgtgcctgatgcccatgcttccctggctatctacagccatgtatttatgcaaatcggtatcgtcaccgccattatcgctattctgatgatgctgaccgcgccaaaactgtatcgcatgacattagatctgcaaaagaaagataaagacgcgactccggtcactgctgcataagcaacccattagtttcgttagtcaaaacgcctcgttatgaggcgttttttgttttgatgcaaaccctgtggatcacacatcaaagtcgatactcgcaaggtgacaatcagctaacggcgaacactgcagatacaggatgggcagtaccgctagcatttaatttcgtattaacttccgcgattgtgcaacgtaatcctcatattcaaccctaccggcgaaatctctacgataacaggacgaaacgatccagccgccgacgtaattgcgcgttttctttcttgagttgctcaacttgcttcagtagcgtcaaggtcatcgccacgccgtgccaatccagatccaactcattttgcaatcgacgggcgcgctggagatacattaacgcttccgcgtcaaatacccagagagaatcaccgggatctagcggaacaatcactcccagctcaaccacttctaccaattcgtcctgcaaaatgcccgttgtctggcataattcagtcagcgtataagtaatctgtacttcggccataatctgttactcccatccagtccgaggattaaatgcagcctgttcagacagttgttgccacagtgcccgtgccttctcgtccggttttggcggcataaccaccttgagaaccgcatacaaatcgccagtgccttttttgctcgccaaccccttacctttcactcgtaaccgctgaccgctctgactgccggagggaatagtcagattgattttccctgtaagagtgggaacttcaacgctggctcccagcgccgcttcccaaggtgcgagcggcaacacgatttgtaaattctgcccgtcaatatcaaacaatggatgcggagcgatacgaatgaccagatagaggtcaccattggcgccgccaccgaatcccggaacgccttgccctttcaaacgaatacgctcgccatccccaacgccggcaggaattttcaccttcagcgttttggttgagtcggttctgccaagggcatcataagttgggatttgaattgcgcgcgtctgctcggaaagcgtttcttccaagaagattggcaactccatctcaatgtcctgcccgcgcatactctgagaagattgatgggaggaataatgagcagaggcgccgcgattgccgaagaaagagtcgaagaagtcggaaaaatcatgggtatcaccgccacctgcacgaccctgccactgttgcccgccgccatgataacctgcctgctggccaaaatgaggatcgttgcgatgtaacctcagttcgtcatattcagctcgccgttcagcgtcttttaacacttcgtaagcctcggcgatttccttaaactgactttccgcatctggctcggtgctgacatctgggtgatatttccgcgctaacctgcgataagccgttttgatctctttctgcgaggccgttggctcaacgcccataatcacatagtaatctttgaattccatacggcaatatccttaagtttaatgtgccatagatataagatatccccatctaacttttataaaacaaatttatgcatatttctatccgtactcccacgcgccaatccacctgtaaactatagcgctgacctgggtttacggactcccctcaagacatttggcgggaacagcccttgttcatccgtatcaagcgctcaacagatgcctgttaatgcataaaaagaacgtcactgacatggaaaaccaccgagtaaggtgacaatctgccaggtcaattgccctttcaaccttatgttattaaatgaattacgtggtaaagtgagcgccaaaataagcgatgcaatcacaatttaagcaacggataagtcatgaatttaagaaaccggacatttcttttttggggagtgatggatctctacgcggtgttatatatcggtttacagtatttcctacaggaaagaattcctttggtagctgaagtgcagtacctgctggataccggttttgataagtatccgctgatttacacaatgattaccctatcgatcatttttaaaatatcgctggtaatgaccacagttctgtttctgactcgcagccaatatgccattaaagcggcatttattcaggagcctttacgcctactgttagttattccctctctctcgatgattacgccggttctgaaagaattcaacattaaaattcttaccgtgagcctaacgctattgctgatatctgaagtattcaaaatcgtttctttatatagagtgcaaataaagaccgagcccaataaaaccactcccttcatcgtctgattcgggggaaaacagcattttcgcgctattggcaaaacgagtcgctcagtgggagccaggccaatgccctgttatgccgcagtctgagtcatttcaccacgagtaccgccgccaggttatctcgctatttcgctaatcacttagaatcaacccaacccattgattacatgcccgtttggcgggcatgcggatgaccgtaattgactgactcatagaagatagctttacttactccgccgaccataccgctaactggtagccatccggatcgagaaattgaaagcgacgaccaccggggaaggaaaatatcggtttaaccatcacgccgccagcttcaacgactcgccgttcggtttcttccagattatcagcatacaaaatgaccaacggcccaccggctgctgtcacgaccccatctgtggtgaaaccgccagtcaggcgaccatcggtgaattcgcaataggttgggccataatcggtaaagcgccagccaaacaggttaccgtagaaattttttgagcgagtgatatctcccactataaattcaatattatcaatttgacccttcttgcctgatacagccataacacctccggagaaaaatgcacaccgcgtattttgcaaatagacgcccgctgagccagcctgtttggctggaaaaccataccattaatcctatacgtgaaatccgtaatattctcagaactgtcgcccatatcgcttatcgccgccagaacccaaagcgtgataaggaataagtaaaattcaccctatcgcaccgaagcagaaataatcctgtataagaaataaactatactgtgatcacggctgcaaaatatgtcggtagtttcagacataacataattttcagccttggcagaagaagtatggcatagaggttaaatcagcccgtgagagagagtcggtaacgggcaaggaggtatctcatggtcaatcatgtttggggacttctggtgcatcccagtcaggaaatgaaacaaatcaaaagtgaatcggaaagtattccccacttttatactcaccacgtcctgttgatggctgcaattcccgtgatctgcgcatttattggcaccaccagagtgggatggaattttggtgagggtcaggtgattaaagtctcctcgcttaccgctttctacgccgccgtaattttctatgtgatgattcttgccgccgtggctttaatggggcgagtgatttactggatggcacgccgctatgaaagtcgcccaagctggcaaagctgcaccttgttcgccggttatgccgccacaccgatgtttctgagtgggattgtggcggtttaccctttgctctggctgtgcttgttcgccgggattgtcgggctgtgttacgccggttatttgatgtacctcggcattccaaccttcctgaatatcgaccgtagcgaaggttttatcttctccagttcaacgctggccatcggtgtgctggttctggagctattactcggtttcaccgttctgttatggggttatggcgtcaggctaatctgagcaattcttataccaacaccctgcaccgtagatctcctacggcgtagggtgtatctctatttcatcttccatgttactgataatagagagattaaccttatgaatagacagcgaacattcgttattgcacttatttccccccttctctgcaattccttccctgctatgagcgctattcctatacaggatgggattactgagcaaactctgattttcgttcgtcatgcagagaaacctgaggcaggttttgggcagataaattgtcagggtttaaatcgttccctggcattacctaaagtgataaaaaataagtatggcaaacctgactttatattcgccccagatccaacgcgaaaaaaagcggatttcggccacttcttttattatctccgcccgttggcgaccattgaaccgacggctatctacttcaatatgccgataaatatccgtgtgggtcagtcagaaagtggctggcttatcaaccaattagaaaaaccaaaatattcaagcgctaaagtgcttatttcctgggcgcatcatgaaatcatggctatcactaaggcactaatgaccgaatataacggcgagcttggacaaatacccgaatgggaaaatactgattttgacagtatttacgttcttaaaatcgtgcgaagtgagggggcaaaccagattagttttacccatgaccaacaggggctgaatggattaccgcttgactgccctgaaatttccctgccgcgatctaattcattaccgggccgagttcccgacaatagctgataataataactcttttttatctcgattttttaacactggatagcaaattctctgtttttgggtcattaacagcctttgaatcatattaatgtcggtgagatcgcaatctcttacatcaccccgacaaataaggttgtacactaattgggaaaaataaaaataaggcgacgaaaatgaaaaagctgactgtaaaagaaatgaccgcaagcgaacaacgcgacgtgaaaacccaacttgatagagccaggatcaacatgggacgcgcactcaccaattcagaacaaaacaaagtgaaagacgaagccatcgaaaaaatcatgcaagcccgagcactggtcgccaaagccaaccgccctgagaaaaaaaccaaaaaaacggcaccgagcaccaccacctttagctggtcctcttccatcagcagccgtccaccacgttgagtctttcccccgtcaggtttttgcctgactgggcacccaatttctagtagcggaggtcatcctccgtcactatcggattgttatgattcctgccgttaaatatgttaattcaatagctgattttccctcacgactgtcctagtatggctaatgctgtattccgttagtccgccccgtgcactattaaggagtttgttgatgaaactgttttataaacctggcgcttgttccctctcaccacatatcgtcctgcgtgagaccgggctagatttcagcgttgaacgcgttgatttggcaaccaaaaaaactgaaagcggcaaagacttcttaaccatcaaccccaaaggacaggttcctgcactggtgttggatgatggcagcctgttaaccgaaggcgtcgccattgtgcagtatctggccgatcaggtgccatcgcgcaatctgatcgcccccgcaggcacccttgcccgctatcatgctattgaatggctaaactatattgccaccgaattgcacaaaggattcagcccactcttcaacccgaaaacgccggacgagtacaaaaccatcgcccgcgagcgtttagacaaacaatttgcttatgtcgatagcgtgctggcgaagcatcatttcctgctgggtgataaattcagcgtagcggatgcctatctgttcactattctgggttgggcaaaagccatgcagttcgatctgccgcagtataaaaatctgacggcctatatcgcccggattgcggcacgcccagcggtagacggcgctctggttgcggaaggtctgaagtaagaaacgtaaagaaagaatgatatcccccggcaatggcagacttgcgcttttgaccgggggaaaatgattagagttttactgccgtaaactgatgaaccggattgacgataagatcctgtgcagccacgatttgtaattcatactcgcccatttgctgggtagtcagcatcacttcataaactgcggcggtgacgtgctccagcgctttatctaacgcttcgccttttagcaaattcaccaacagtaggccgctggttaaatcaccgacgcccaccggctgacggctgccgaaatccaccaacggacggctgatatgccaggcatcttccgctgttaccagtagcatttcaaagctgttcaggtcataacccgcgcggctaagatgcttaaccagcaccactttcggccctttagcgcacaggccgcgagctaccgtcacggcttgctcgacgttttccactcgcgttccgctcagctcttctaactcaagcaagttcggcgcgataatatcgctggccggtaatgcctgcttacagaagaattccgccacgcccggcgcgacgatgcagcctttttccggatggcccatgaccggatcgcagaaataccacgcctgcggattggcttccttcacgcgtttcaccgcagccaaaatatggccgccctgctccggcgagccaatatagccgctcagcaccgcatcacagtctttcaaacggtcaacatcggcaatgccctgcacaatttcagtcaaatggctggctggcatcacgcagccagtccaatgaccatactgagtgtgattggagaattgaacggtgttcaacggccagacattaacgcccatgcggcgcataggaaattccgcagcgctattgcctgcatgaccaaaaacaacgtgggattgaatggaaagtatatttttcatcggtacggcctaaagttaggggctgctcggccctttcagtaacaccattatcactgcgtgtttgcccgcagttaatcgttgaccataaaaaacaagggacaccaggccccttgttttcgcaccgatttagatccagctcaccaggcagtaatgttttttgccccggcgcagtaaggtaaagcggccaaacagacgatccgcatcgctaaaggtgtattccgggttcgcctgtttctcgccgttaatggtcacggcattggaaccaatcagggtacgcgcctgaccgcgggacggagccaattccgcattcaccagtgcctgttgcagatcggcatcgcgggttaactcaatcgccggcataccgtcttgggccagttgggcaaagtcggcttcggtcatgtcgttcagattgccggagaataggctggccgtaatacgttttgccgccgccagaccttcagcaccgtgaaccataccggtcacttcttcagccagcacgtactgagcgcgcggcgctttgccgctgtttttatcttcttcttccagcgcattgatctcttccagactcataaaggtgaagaatttcaggaagcgatacacatccgcatcggcggtgttaatccagaactggtagaacttgtacgggctggtttttttcgggtctaaccataccgcgccaccttcggttttaccgaatttggtgccgtcagctttggtaatcaatggcacagtcaggccgtacacttgctgctgatgcagacgacgagttaaatctatcccggaggtaatattgccccactgatcggaaccgccgatttgcagaaccacattatgctctttattcaggcaggcgaaatcatagccttgcaacagattgtaagagaattcagtgaaggaaataccgctatcatcgcgatttagacgttgttttaccgcttctttgttaatcatttggttaacagagaagtgtttaccgatatcacgcaggaaagtcagcacattcatgccgccgaaccaatcgtaattgttggcggtaatcgcgctgttctcgccgcagttgaaatccaggaacggggaaacctgatgacggattttctcgacccattcattaacggtatccgcggtgttcagcttacgttccgtggctttgaagctaggatcgccgatcaagccggtcgccccacccaccagcgccaccgggcggtgaccctgtaactgaaaacgcttcaggcacaacaacggaaccaaatgacccaaatgcaagctgtctgcggtaggatcgaaaccgcaatacagtgaaattggcccttgcgccagtctctctgctaacgcgtcttcatccgtaacctgggcaacgaggccccgctcttgcaattgtttaatcaggttgctgctagtcattaacgactccattgtcttatgcaatatatttatctggttaacgtttaacgggaacacttgccatcgggaaatgttgtcgtttatcggcgtaatgcctgcgtgccagatggcaccccatcaggatgcgttcaaggaagggtatagaataaagcgcccgccccgcgagcgctaggtttaacctcaatatttcatcgttctcagggggctaaacggtcaattttccacgtatcggcgtctcgttggtagagaaaacggtcatgcaggcgatgttcgcctccctgccagaactcaaccgagtcgaaacgaacgcggaatccgccccagaaactcggcaccggtacctctccctgctggaatttttgtttcaactccaaaaatttgctttccagcacgccgcgcgcggaaatccgcgaggattgctgagaaacccaggcacctatctggctatctttaggacggctgttgaaatatttaagtacttcgaaggtcgacaaacgttcggctttgccgaggaaaatcacctggcgatccagcgtatgccaagggaatagcaggcttatatgggggttttcagccaattgctgagcctttcggctgcctaggttggtgtaaaacaccatgccttcgtcatcgaaatgctttagtaatacaatacgttgaaaaggttgaccattggcatcaacggtcgccacgcacatcgccgtcgggtctgcgagacgcgcttcacaggcttgtttcagccagcgctcaaataaatccagcgggttagcagtcaggtccttgcggcgcagaccgccacgggtatattcacgtcgtaggtctgcaacatcaaactcattattttcagtcatatacactctgtaacgcgctgaaactcagtggattattattgtgcctctgtgacgccaagatctcaatcgccctgacgtcactgcctgtttctagtagtcaatcacttcgagggcacgagcacgcaatcattcatcacgattttatcgccccgctcgataaaggcgctgtcacctttcgaccagaacgtataataaccgtcactgtatcgggtgcccgaagcagcaactacctgcggcagattcagttgcttgccatccatcacaaacctaactttgtcctgcttattatccagcgctaccgtcaactgggtacccccgcattgatagtgcaaagtttcacttttctgtgaaaactggctacatccagccaaagtcagtacggcaatcgccgtgaaaacggatttcattgccttatctcctgtcatgagcttctcccgcagcctatcacccgtaggctggacttaccgaatatattgaattgcagaataaattgaatcacctaatatcctaaaagcgtcgccttatcgccctggctgtatgaccgggtaaatcgcgcccaaaacggtttcacagctggctccggtaaccgacggtaaattgcccggcaggcctgaaagcgtgcgaaatgctagccaggcaaaagccagggcttccatatcgtcgccactgacgccaaagctgtcggtggtcgcgacttcagtgcccggcaacatcgtcgacattcgcgccatcaatagtggattccgcgcaccgccgccgcacaccagcaaacgctcgcaacctcccgccagttgaacctgttcggcaatggtcaccgccgtcagctctgccagcgtcgcctgcacgtcttcaggcgctattcgcggcataatcttcagctgctgttccagccaggcggcgttgaaatactcccgcccagtgcttttcggcgcaggtttggcaaagtaaggatcggacaacatttgcttcaatagcggctgattgaccttaccgctcaacgcccattcggcatcgcggtcgtaaggcaacgagcgatgacgccaaatccacgcgtccatcaacatatttccggggccggtatcaaaacctctgaccggagaatcagggatcagcatggataaattagcgataccgccaatattcagcaccatccgccgttcggcattatgcgccagcaatgcgtggtggaaagctggcaccagtggcgccccttggccgccataggccatatcccgtcgccgaaaatccccgacggtagtaatctgcgttatcgccgcaatgcgattattgtcccctaactgcagagtaaaacctggctctcccatcggttcatgccagacagtttgcccgtgacaaccaattgcggtgatgtcctgcggcgacacgccggtttttttcatcagcgccagcaccgcttcggcaaacagcgtgcccaactgcgcatctagcctgcccaccgccgataaggtggtttcttgcccctgacacatcgccagaatatcttttttcaactgaagcggtatcgggtggctataagtggcctgctgcgccaccattcgctcattgatcgcagccagaaccacatcgattccatccaggctggtacccgacatcaccccaataaagcggcctgatttcatagcaatgaccttatctcccgctgcgggagtacaatgacaaaaaaaaaacaacaacccccaatgaggttactaaaccagaataataaaattaacaccatgaaaagatgtagtttttagagtgtatcccgcgctgtcttcccctatataatgcaaggctggttttgccaggcagctcacagaaaatggatgatttttttctttttcatttcctgcttttagaaatttaaaccaccgtttaatattgattaagggaatacacgttaggctagcgatcaactaaccgacaatgtgcttcaatacagtgtggtgcgataactacaatgtgatgcaataactgttggggtcagccatacttttatctatacccgaaattaattggtttcgcgtataggtagacaggacatagtgaaccgaatatcggttatgcactttaaactaggagtttttatgattaagcctttcctcgtcattgctatcgctgcggttactctgaccggttgtgcgaacaacagcacgctgtctggtgatgtattcagcgcgtcacaggccaagcaagtgcaaaccgtaacctacggtacattggtttctgttcgcccggtaaccattcaaggcggtgacggcgacaacgtaattggcgctatcggtggtgctgtgctgggtggtttcctgggtaacaccgttggcggtggtaccggtcgtagtctggcaaccgcagcgggtgccgtagccggtggcgttgctggtcagggcgtacagggcgcgatgaaccgtaccgatggcgtgcaactggaagtacgtaaagacgacggcaccactattctggtggttcagaaacaaggcccgactcgcttcagcgttggccagcgtgtgatgctggcaagcagcggcagcaccgtgaccgtcagcccacgttaagtttggcgcggacataaaaaaaccggggatcacattgatccccggttgttttcttttgctgtgaatagattatttgaactttattatttttacttactgtgtaattgattaatattttgttcaagtttcattagcacacctgttaacaaaataacctccgcatccgtgatattcgacatgacttcgcctcgggttgtttcaatgacgtgttcgagttttttgatggtcgaacacgactcttccgttaatttaatccgcttagcgcggcggtcgttagcacaagtctgccgtgtgattaatcccttatcctccagttggtccaaagtccgaaccaacgatggctgctcgataccaatcgcttttgccagttgaatctgcgattgctccggtggtaaacgactaatgttatggagcgtaacccagtgtgtttgggtcagttccaacggttttaatcgatgatcgattaaagcgcgccaaacgcgaactaatcgtgctaaatcagatcctaatgtcgattccaattgcccctccttttaattagcgtgctagcataactcccagagtccagtctattttgggtaattaacattaaaaatacaaatgtatatataccgccgatgcagtgttaatagcaataaatacgagaaatcctttagaaaaggtgaagatttctttaattctaaccccaaaggattaacccaatgcaagtaactcctgtaccaatggcatcacccttaacggactgggtactgggtgcctcgatctatttcccgcctctcttcaaggcggttatgctaggtttgatattttggctattgatccatcatttactacggaattggatctactctggcgagatctggcatccaatgttaatggatttgtctatttttgtcattgccgtcagcatttctttgtggattttagtcagttggtaaattgagatgaaatatcaatcgataaaatatttttccagcgtgatcgtttttgctatcgctatgttcgccggtgggtggatgtggaattattatatgcaatccccttggacgcgagacggaaaagtccgcgcagaattagtcaacatcactccagaagtgtccggcaggcttattcaaattgcgatacacgacaaccaattagtaaaatccggtagtctgttattcgagctagacccgatgccgttccaactggcgttggataacgcgcaggccgcattggataaagcgcagtccgatatggataaggccaatcatgaattggctcgacgtcaaaatttacctaaaaacctcatatcaggcgaagacctggatattgccaatttaaccgctcaagcaatgaaagcggcatatcagggcgcgctggctaatctggaacaggctaaatggaacctgagtaaaacccatattcatgcaccgactgagggatatataaccaatttacaaacgcgcatcggaaattatgctaccgcggggactccattagtggctttggttgatattcattccttttacgtaatgggttatttcgaagaaaccaaattacgacatatcaaagaaggcaaccgggcaaatattgttttatataatggaaatataccccttcagggtgtagtagaaagtatcgggcgcgccatttacgatcaaagtgtcgatacaaatagcgacttgctcgtcgatgttaagccgaatgtcccctgggttcgtctggcacagcgcgtgccggtacgtatcaaactgatcgatgttccgccggacgtaaccttagtggccggcaccacctgcaccatttctctggctgactgacaaaaatgcactggctaccgctgcagtggaaacgcacgccctgggggaaggccagcggggcgcagtggcgctatgccttgcgtaattcgctggcgatgtgcttgtcactgtgggttgcttttactctcaatctggatgagccttattgggcgatgacttccgcggcggttgtgagtttccccaccgtcggcggtgtaatcagcaaaagtattggtcgggtgattggtagtctgatgggtgccgctgcctcggttattattgcaggtcactgcctgaatgatccttggctgtttaccttcgctattgccgcctggatcggctggtgtactttcgtatccaaccattatcaaaataacgtttcctacgcctttgctctggccggttataccgcagcaatcatcgctttttcaacggtcaacactacggatactcaacaaattttcgatatcgctcaggcgcgagtctgcgaagtgattaccggtattttgtgcggtggcctgatgatgatgctgttgcccagcacctcagacggcgaagcgctgctgacctcgctgcggcgtatgcattcccgcctgctggaacacgccatgctgctgtggcagaccgaagacgatccgcagattcgtacctcacacgagggcgtgatcgggcagattctgacgctcaatctgttgcgcattcaggctttctggagccactaccgcttccggcgacaaaacaatacgctcaattttatgctgcataatcaattacgaaccaccagcgtcatcgccagtctgcgacgtatgttgctcaactggcccaatccgcctggcaatctgaaaaaggttttgcaaacgctgattaccgagcttcagcagccagattgcgataaatatcgagccgccaaaattttgcaacaaattatcccgcgagataaagatgattaccgccaccgcgcattctggctgcgtttacgtcatttctgttggttgtatctggaatctggccattggttacgccaattggaacaacacagtgaacgaactacattgcccctccccaaggttgccacgctggcgcgccacaccgatacctacgaagcggcttacaacgggttacgcacctttgtctgtatcgttattggctgcgcattctggataaacacccaatggagtgcaggcagttcggcgctggctttggccgccgtcagttgcgtactgtattccgccagcccgtccccgacggacagcatcataacgttgctgaaagccatcgtgttgttatccatcggctgctttattttaaaattcggcgtcatgattcgaatcgacgacttttggttgtttgctgccgtactcttaccgatcctggttaccatgcagatgtttaagcagcaaaatccgccctacgcggcgctgtgggggcagcttatcgtttttatgggttctttcctcagtgtgaccaatccgcccagctacgactatcagggcttccttaatgacaacctcggcaagttggtgggcgtgatgctggcgggcgtggctttccagattttgcgccccagttcggataaacgaaaaggccaacgaattattcgcgccctgcggcgagactttatcgaccagctcagcccttatccgcaacaaagtcagccacgatttgaatcgctgatttatcatcgcatcagccagttaaatctcagtcaggatcaggaagcgcgcatctggctgttacgatggggcatggtctatctgaattgcagtcatgtggtatggcagttacgggactggcaaaccactgcgccgccgctgtctgcggtgcgggatttgtgtattcattgtctgaaaggcagcgtaacggaaaaaggcgttgagcctgaagcgttagcggcaacgctgcaagagctactgcgcatcagcgaaactctggctcatcatccggactcgtcggggcgagaactggcggggctggtttggcgtctgtactgctcgctgacgcaactgcagctcgccctcaccccgccggctatttcttcccctgcctaaggattagtcaggggagatcaatcatcaaggaacgtcataacccaaagcggcgcggcgaatgcggaaccactgctgacggctgagcgttagggatatcgatttccacgcggcggcaacgcgctcaatcttgcctgaaccaataatcggcagcggcacagagggcaaacgcatcacccaggcatagaccacttgctcgatattctccgcaccgatttcttccgccacggcctgtaattcatcacgtaatggctggaactccccatcgttaaacaaacgcccaccgcctaaacatgaccaagccatcggtttaatacgcaattgctgacacatatccagcgtgccgtccagaatggtaggctgatgcaacggcgatatttccacctgattggtcactagcgagaaaggcaggcgagattgcagcagactgaactgagccggtgtgaagttagatacgccaaaatgcttcactttgccgcttttgtgcaactgagtgaaagcctcggcaacgtcgtcagcctccatcagtggatcagggcggtgaatcaacagcagatccaaataatccgtgtgtaaatgagtcaatgattgctcggcgctgcggataatatgatcgccatcggtattgtagtgacccaaggcgtgctctggcttagccgtcgtcgcgatgccgcatttgctgacgatttccatcttatctcgtagtgatggttgtaaacgcatcgcttgtccaaaagcctgctcgcactggtagccaccgtagatatccgcgtgatccaccgtggtaatccccatatccagatgctgctgaataaaaccctgtagctgggcgggcgtcatgttccattcgatcaaacgccagtaaccgcaaatcatgcgggaaaattcagggccttgcggcgataattggctacgtgtatgcattttgaccacctatatatgttgaatgaccttcagcatacacaagcgacagaaaggatcatcatcctgacgcaaggaaatggcggttgatcggtatcaaaagatgaatttaaaataatgacggttgttccggtagcggttcttccggttttttgttggcacgtagctgacgcaacaaacgttgacgacacaggcgcagaacgtcgtgtttttgcatgtcggtcatttgcatccagccaaagcgctcttcccggctgcggaaacagccacggcaaaaaccacggtcatctgcttgacagataccgcgacaaggactgggaatatcaaaaaactcaagctgctgagccacacaacctcctcggattaccctttcattgaagacggcttaacggcggctggcaagtacagattcgcgatgtcgctgaaaataatcccgcagataacgtatcacctgacgatttttttccggcatcgccctttccagcgtcaacgcatgtaaccgcagcggcgttgattgccactccggtagcagcgtgattaattctccgcgttgcagctcatcaccaatttcatacaaaggcagcacggaaagccccatcccttcgcgagtaaaatcgcggataaccggcatactaccgctaataacctgcccgtgattcagacgcaaaaccatcgtttctcccgatgtgtgatgcaaatctaaatgaatagccgagggattattcaccgaggacatccagcggtgcgccagtaagtcctgcggcgtttctggcacaccgtgctgactgagatagcgcggtgcagcgcaaatcaccatcggccactccgccaacggatgggcaatcatattggcgtccgccagctgtcgattgactcgcagagcgatatcaacccgctgttcgatcaaatccaccacttcgtcattggccagaatccgcagggttaatttgggatgagcgtttagcaaaggggacaacgcttccgccagcgggcgaccaccgatacctacggtagtggcaatgcgaatttcgcccaccagcgtatctcgtagctccgccaaccgctgctcggcctctttcgcctgctgcaacatggcttcgcagccgggataaaaaacctgcccggcttccgttaacgtcagcctgcgggttgagcgatgcaacaaggggacgccgagcgctttctctaaagagcgcatatgctgactaatagcggatgcggtcatacccaaccgtcgccccgctgcggttagcgaaccttcggccactacggtggcaaaaatcgccattcggttgagtttatccatgattatgaagttttacttaaagaagaaagcacaaatatggcacttatcagccagtttgttaagtattagagttagccccgtcaacccaacttgaggaattaaacgatgaaactggcaattattggtgcaactggttttgtaggccgtaaagtcatcgacgaagctctggctcgcggtcatcaggttacggcgattgcccgtcagcctaaagatttacctaaaactgataacctgaccatcgcattaggtgacattgctgatactgactggttagcccaacaattgagcggtcaggatgcggttatcagcgcttataaccctggttggaccgaagaaaatcagtttgaaaaattcacggcgggaagccagaaaattctggatgcgcagcaaaaagccggcgtgaaacgcctgttggtggtcggcggcgcgggcagtctggaagtcgcccctggcgtggagttagtcgatacgccagacttcccggatgcctacaagcaaggcgccttgggcgcccgtgcgttacgtaacaagttacgcgctgaaaacacgctggattggacctacctgtcaccggcggccttgctggaaccaggaaaacgcaccggccagttccgtttgggtaccacttcgttgctgatgaacggcacggcgccagccagcatctccgtggaagatttagcggtggctattttagacgaaatcgaaaatccgcagtttattaaagcgcagtttaccgccgcatactaaggacgaacccgttctgcatcagcctcgcgcatggcagtcaaacctaccctcataggtgtgccgtgcgcggggcttttcttctttccgcttgtgtcacgtctttccgcttttgtcacgttttgtttccaaacgctaaggttatcttaagtttgctactgtatcgtgccaatcattaatgaataattggttctgattagcaatgaatggacgattcaagttacagtgtaacgcaatcacctttatcttaagctgcgcgctatttttcacgctgtttctcaatgctctttttatacacaaagcctggtcgctgatcgccttcggcagcctagatagttatgtgttcgccgccacgattccgctggtgatattctgcgcgttgaatattactttcagcctgctgtgcgtgccatatctgcggaagccaatcattatcacactgctgctgggcagcgcggctgctaactattttatgtttagctatggcgtggtgatcgacggcaatatgatgcaaaacgcctttgaaaccaatgcgcaagaggcaaccgccctgctcacgccacgcatgggctggtggttgctggggctgggcatattgcccgccgtcgtcatttgtttcacccggattgagtccaccaagccttggtggtacatgctgggtctgcgggcggccaatattctgttatccatgatgattattctgctgatcgccgcgttattctataaggactacgcttcgctgattcgcaataacaaaagcatcgttaaaatgctcacgccgtccaactacgttagcggtgtgattgagtatgccaaacacaaatatttcaccaataacctgccactcattcgtatcggtgaagacgcgcataaaggcccgcagattttggcgcaacagaaaaaaacgctgatgatactggtggtcggcgaaactgcgcgcgcagagaacttctccctcggcggttacgaacgggaaaccaatccgcgtctgaagcaggatcaggtgatttattttaaaaacaccgcgtcctgcggcaccgaaaccgccgtgtccgtcccctgcatgttttctaatatgccccgtaaagaatacgatgcgaccctcgccagccatcaggagggtttactggacattgtggcgctcgccggggtgaatgtgctgtggcgggaaaacgacggcggctgtaaaggtgcctgcgatcgcgttcctcatcaggatgtgacgcagttaaatctgacacagtactgcgaaggtgatgtttgtatggatgacgcactgctgcataatctagacaattatatcaatgggttaaaaggcgacagtgtaattgttttacatcaaatggggagccacggcccagcctattatcgccgtaccacgccggaatttcgcaaattcacgccaacctgcgatagcaatcagattcaggattgcagcccgcaagagctggtaaatacctatgataattccttgctgtataccgatgcgacgctggataaaaccatcaaaattttgcagcaacacagtgatacatttaatacggcaatggtttatctgtccgatcacggggaatctttgggtgaaaacggcatgtatctgcacggaacgccctacctgtttgccccaagccaacaaacgcacgtgcctatgttgctgtggatgtcagcggattatgaaaagaatttcgccatcaatcgcaactgtttaaaccaaatggcgcagcaggctgaggtttctcaggataatctgttccataccattttagggatgatgaatattcagaccaaagaatatcagccttcattggatatactgcactcttgccgctcacctgcctgatggaaagagattaacgcttaaaatgatgaccgctgatgttcgccatcggcggttttatctgaatagcgggacaaagaccttttatcaaacctatgaatgataaggtgattatttaaaatcaccttatttacagcctcgaaaagctctcggtgtatctttttttcttgacctagaccagtcggtctattacgctaatggtcatgaacaagatattgcactctcaaactgatacccgcgaacatctgttagccaccggcgagcacctgagcttacgtctgggctttaacgggatgggactcagcctgctgctgactaccgctggcgtaccaaaaggttcgttctatcattactttaagtcgaaagaagctttcggcgaagccatgctgcaacgctattttgatcgctacgatactcaaatgcataacctgttttccaatccgcaaggggatcagcgccagcaccttctgggctattttgctcagggaattggcaatttttgcaacagtgagtgccacaacgcctgtctggcggtcaaactttctgctgaagtgagcgatttatctgagcctatgcgccacgcactggataccggcaccgctcgggtcatccgtcgcttacaggacgcgattgaaaaaggcattgaggagaaatccctgcgggtggttttatccgcatccgccacggcagaaacgctctatgccctatggctcggcgcctcgctgcgcgccaaagtgaaacgctccgtcgccccactgacctgtgcgttagaaagtatcgaattgctattacaaccgacagcctgatttaacagccactcatctcgcctgcgaggtaagtgtcttacacaaacactagacgactggtctattattacaggaattatcatgaagacagcaaaattgttctctccgctaaaagttggcgctgtgacgctgccaaatcgcgtgtttatggcaccgctgacccgtttacgcagcatggaaccgggtgatgttcctacgccgttaatggcggaatactacgctcagcgtgccagcgccggcctgattattaccgaagcgacgcaggtgtctttccaggccaaaggctatgcgggcgcaccgggtctgcatactcaggaacaaatggaagcgtggaaagagattactcaggcggtgcatgataaaaagggtcatatcgcggtacaactgtggcacgtaggccgcatttcacacagtagcctgcaaccgaatcaacaggcaccggtcgccccttcggctatcgctgcggattctcgtaccacggtgcgggatgaaaacggtgcttgggtgcgcgttccttgctcaaccccgcgcgcgctagccttagaagaaattccaggtattgtggatgatttccgtaaaaccaccgccaatgctcgcgaagctggcttcgatttcatcgaaatccacgctgctcacggttatttgctgcatcaatttatgtctccggcgtccaaccaacgtaccgatgcctacggcggcagcattgaaaatcgcactcgcctaacactggaagtggtagatgcaaccgccgctgaatggggcgcggagcatattggcatccgcatttcaccgctcggcccattcaatggtctggataacggggaagatcaggaagaagccgcgctgtatctgatcgatgaactgaacaaacgtaaaattgcctacctgcacatttccgaacctgactgggcggggggtaagccttattcagacgccttccgcgacgccgtgcgcgctcgtttcaacggcgttattgtaggcgctggcgcttacagcgctgaaaaagctgaagcgttgatcgaaaaaggctttattgacgccgttgcctttggccgcagttatattgccaacccggatctggtacaacgtttgcagcagcaagcgcccttgaatacgccggacggtgacactttctatggcggcggcgctaaaggttacaccgattatccaaccctataatgccgcgatttagctaaacatcttaatgccggtgagcgtttctcttaccggcattgctgtatttaaccgccatttgcgatttcctctcgagcagcacactcatcgatttacgccgcgaacgctgcgccccaatgttagagtgtagagaaatttgccagcgctgtgcggtattcgcctgactgggcttatcggggtatctgtggcgttcaggtgacgagtatcgcgcaacagcccatggaagaagctctgtcgcaacacatagtattggtgtttggttcaaagagtattcagagtcgcgacggaggtatccccagccagattgcagagtggatgaatcaccgtcgtaacaattaaacgccctgcatgacggtatgcccatccctttcccgacccgtggagtcagctgctgggaaagtcatgggcaaagacgacgctgaccgtctgatggggcgcttagcgccctttcttcttgcgaccgggctgggcaaaacgcttgcgggaagcggtgttatccgcgggtttttcgacgcttttcgggcggttaacgctcggttttttcgcggcagcaggcttggcctgcgcttttttttgccggtttctcgtcagaggaggaattttcaatcagcttgaataattcaatcaactcatcgtcggtcaaatctcgccactcgccctgcggcaaccctttcagattgacgttcatgatgcgagtacgctcaagtttggtgacttcatagccaaaatgcttacacatacggcgaatctggcggttaagcccctgcaccagcgtaatacggaacacaaaaggcgcttcttttttcactttgcactttttggttaccgttcccaacatcggcacgccggcagctaaaccaagaataaattcgtcagtcaccggtttgttaacggtcactacgtattctttttcgtgatcgttccccgcccgcaggattttattgaccaaatcgccgtgattcgtcaggaaaatcaacccttgggaatctttatccagccgaccgatagggaaaacgcgtttgctgtgattcacaaaatcaacaatattgtcgtgctcgccgtcttccgtagtacaaataatgccaaccggtttgttgagtgcgatcagtaccaaatcatcttcattacgcggctcaatcagctgaccgttaactttcaccacatccccgacataaacctgatcgccaactgaggctctcttgccgttaataaaaacatttccctgttcgacgtaacgatcggcgtcgcgacgagaacagatgccgctctcgctaatgtatttgttaagacgaatggatgagttggtcagcatagttcttccgaaaagggcggactataccttatccgcgccgggttgcgaagcctgtaaagcccgataatttaaatggtgcaggccccgtcaagtagtgcggtgccataagaattgtcgatagtacataaccaacgtccgtccggttcatggcgaaaaacgtaagtcgcttatcgggacgctgtcaccgatcctccctgtccgtcaggaaaatgcaacaccgtttcgatcatcaccaatgcatcgcccgatcctgcaataacctgcatttcgccctgctcaaccaccagccgatcctgaaaataatcggaaatagcaataaaagcccgacgaatattgtccgttcctctggcaatcatgccgggtttcgccaccagcgccgtatcttccgcatagtgctgcatcagtgcgtcaaaatctcggttagaaatcgccttatcgcaggtttcgatgattaagcgtatgggatgcgtggtcacggatttcgtccttataaagataaaggctgagcattcccttaccttggcacccttccggcatcatagctccctcaactacccgcctgcaggacagcaacatcgcctgaacgcaaaaatactgattacagcgtaggcaaaagaaatatcggctgccccaccagggtagtgagcaggaagatattgctatatcattgatgactaagtttgattcatgatcacttattattaattaattgataaaagaggtatttctatgcgcttacttcataccatgatccgcgtcggtgatttgcaacgttccatcgatttctacaccaaggtattagggatgcgcttactgcgtaccagtgaaaatactgaatataaatactcgttggctttcgttggctacagcgatgaaagccaaggttcagtcattgaactgacctataactggggcgtagacagctacgaaatgggcaccgcattcggtcatttggcgctgggcgtagacgacgtagcggccacctgtgagcaaatccgtcaggccggtggcaaagttacccgtgaagccggcccggtaaaaggcggcaacaccgttatagccttcgttgaagatcccgatggctataaaatcgagctgatcgaaaataaaagcgccggtcagggtttaggcaattaatcgagctgccccgtgctaaaagcgcccgaaagcaatttcgggccgttgacgtgcaatagccgcgaataggaaatagaaggtcactggcgttaaatctgatgagagttcccgctcgcacgttcatacttgcagctaacgcctttacttccctgattttagagcaggttttgatcgcgatccggcttcaaccttggcgtctccccctcttctgatgattcctcctgcatcgcgcggaaaagtttgacataatgcgcgcaatattcgaatgaagataagaaactaatggcagaaaaaagtgatgttaacgccctgagtggccgttttcgtgggtattacccggtagtaatcgacgtcgaaaccgccggatttaatgccaaaaccgacgcattgttagaaattgctgcggtaaccttacaaatggatcaggacggttggctaaagcgggatgaaactctgcatttccacgttgaaccttttgaaggcgctaatttgcagcctgaagcgctggcgtttaacggcatcgacccaaccaatccgctgcgcggcgccgtgcgggaatatgatgcattacacgccatttttaaagccgtgcgcaaagggctgaaagatcatggctgtaatcgcgctatcatcgtggctcacaatgccaatttcgatcatagctttgtgatggaagccgccgagcgtgccaaactgaaacgcaaccctttccacccttttgccacctttgataccgccgccctcagcggtttagtattagggcaaaccgtgttggctaaagcctgcctgactgcgggaattccctttgatagctcacaggcgcattccgcactgtatgacacagaacaaaccgcagaactcttctgcgaattggttaaccgctggaaacgcttaggcggctggccgctggctatcgctgacgaatcttgagtacaacggctccttccccgagacgaacgcccgactaaccgtcaactgcctctttaaacgaggcagttttgcgcggattgattcaatatcaaacgctcatcgctttaatcaattcgagccaaattctcttcgcttttttgtttgctatgacttgtccagatgactcaatagattatctctattacattcagtatccataaaaaattttaattttttctactcactttatatccgctactagaaatattttatttaatctattaaatatcgctttaaaataaataaaactcacatatggaataacaaaaaaatatcaaattagaactcataaattagatcaaaaaatgatggaaataagaaaagaattaaaagtcaccaccacaacatcacaaacaaagatccctcctagacaacaaaataatagcgtgataattttggcgggatattattcattaagatagcaggatgttattcatataagttaatacaatacatcacacagatagcattcttgatatcaactaaaacagctccaacgccaataaagcgcagtacagtgaactcaagccggttacaactacagcgcagatgcaccacaacctgtggaactccgtagtcttacggtcataaacgtttcttcacgaggaggcatacgtaagcaggatatatgctgggaaatagtgataattaatcaatgaataaatctgtggaaatcatactggcaataccaaaacaataatcaattggcgcagagaatagtaaaaacacgattacctcagcgtgactcaatatcttgaagaaacattaaccaatagaattcacctctaccgggtgatttttatttccctgatacgacacagttaatctatttaatggatcatttaattctatggataaaaaacatattaaaaatcagattttctcatgcaatgagacaacggcaataatccactcccctttagctaaaatatcggcgtttattattcttacctgcggcgtttctggcagcacctccgttctggccgaatacgcggaattggttagcggtgatcaggttgttagaacaggagatgttattgattcaggcgatcggcaagcagtggaaaatggcggtaaaagccaagacgcgacaataaatcaacggggcgtacaaattgttcgcaaacacggtacaacatatggaacgactataaataaggatggagtccagagcctgtatggcaatggaatcgccgacttcaccaccattaatcccggtggagaacaagagattgggttcagaggtctggctaaaaaaaccaaaataaacggcggcacacaaacaatccatgatgcgggattttccgcatatgcggtgatcgagcaagatggaacgcagtctatccaaaatgaagggttagcctacggtacgaccattgaaagcggaaatcagcatgtggcaaaaggaggtacagccgctcacagcacggtaaaaggccgcggcagactgaacgtaagcgccggtggccggcttacgggtaaaacactcatccttgaacagggaacgttaaactttacagccgaaagctcagaggatgttttacgcaatgacgggcaactgatatttcaacgcgatgattacactctggattttggcttaggcgggagcggctccagcgctgtggtacaaaatagtcccggcaacacattaaccctgacccaaccgagccactacttctcggaaacaataatcaagcaaggtaccgttaaagccgcagaaaaacatgtactcagcccaaactctcagtttgcaatccattctaatgcgactctggacttaggcggttttgatcaaaagcttatcgccctaaataataacgggacagtcaatttcggccattcagataaaagggggacgacattaatcgtcaccggtgactacagcagtcactttggtctgttgcacatgaacgcgacgttggcaggcgacagctcccttggcgataagcttattgtggaaggtaatacgtcaggccatacgtacgtacaggtgaacaatctgggcggcagtggcgcaaaaacgcttaatggcattgagttaattactgtagcgggcatgtctgacggtgtatttgttaaaaacagccgtattgtggcaggcagttatgaatatgacttacacagaggttcgggggataaccaatcgaattggtatctcagtagcaacatgactgatgaccatacgataggagtcgacgacgtcgaagctgaagaaagtagcctcgataccccgctggcccccattcccacactcaccgatgacgatgagctaatcgatgacaatgagctaacggacgaagagccagaaacaagcagcccagacaccccgcacgttgtcgatcctgaaataagtgtctctgaaataaatgataatgatattgacgcattacctatcacagatccggaaataaacaatcccaataccactcccgtgtcagagatacccagcattcccgccgggtctgatgcagatcctgatgtggatacgaatgtcatgaccttacgcccggaagccgcagcctacggcgccaatctgtctgcagcgaataatctgtttataacgagtctgaatgaccgtttaggcgaaacacactacacagacgtacatacgggagaacggagagccaccagcatgtggctgcgtaatgaaggcggacaccaacgcacccgcgaatcgcaggggcaactgagcagcctgactaatcgctatgttgtgcaactgggaggcgatattgcccaatggagtgataatgcctgggggcatttccggttggggattatggctggttacggcaacagcaaaagtaaaaccgaatcccgagtctccggttataacgctcgttcctccatcgacggctatagcaccggtttatacagcacttggtatgccaacagcgaagaaaaaagcggtttgtatttagacagttgggtccaatatagctggtttaacaacagtattagcgggcaggaactggcaaccgaaaggtacaaatccaaaggtctgaccgcatcagtggaaagcggttataccttcaagctcgcgggaaacatggccagaaatgccgcgtactttattcagcccaaagcacaaatgatctggatgggcgtcaaagccgatgaacacaaagaggaaaacggcagctatatatccggtgtcggtcaggggaacatccaaacccgtctgggggtgaaagcctttatgaacggctacagcgatttggataaaggtaacaataggattttccaaccttttatcgaagccacctggctccacaataccaaaagcttcggtacgaccttggatagcatgacggtacaacagagtggaacagccaatattggcgagctgaaattgggcgttgaaggtcacatcagtgaaaagcttggcctgtgggggaatgttggccagcagataggtggacagggatatagcgataccgccgtcattttaggcgtcaaatatcaattttgatccatgagtcactcatcaacattctggtaatcaaaccaatatcggttgttcagtatagaactctctaatcagcggcaataaaaatgggtggccttggccacccattttttacgttctaacttatcagataatcgcgcgcttattcagccgcctgatcttcctgtgaacggtatttgtcagcggtttcttttaataattgctgcaattcgccacgttgatacatttcgatcataatgtcgcagccgccgattaactcaccgtcgatccacagctgtgggaaagttggccagttagcgtattttggcatttcagcgcgaatatccgggttttgcaggatatccacataggcaaaacgttcaccacaggcagacagcgcctgtacagcctgagcggaaaaaccgcagctaggcaatttaggcgagcctttcatgtacagcaggattgggttctctgctacctggcgctgaattttttcaatcgttgtcatctcttgcttcctcaagccatattatggctaacactgacgtcattgcgcttagccgtaataacaatctatttgttgcgttcaggttattgtaacgactgtggcgccccgaataaaacgccattttttgcagggttttatcacatcgcgcctatctgaataggctccgctacataaatactcattgagaataacatttttacttcagcaaattcaggaatatcttttatagcccccgattccaggatgaaagctaacactatgacaaatggttatttatgacgcattagctgcataaaaaggcggcaattgacaagccattaacgttttctcacaaaatctattagaatcatatagctctccgcttttttatacggcgagtttcagcaatactgtgagtcttccatcatccatttcagggtcaaggttggtagcgttattatgcgtttattcttcacgctctttgtgctgctgtttacccagctatttttaaatctggcacatgcttcgccgcaggcgcgcgtatctgccgaccagaaaaaaagccatgtgagtcaggctagccctgacgatcgcaaaaaacggaaagtcgataataaaagcagcagtaagaaagttaagccagtgacccaaattaaaaagaaagttacggctaaaaccgcggctaaatcgacgacgggtaaagtaagcaaaaccaaaacaaccgccaacgcgaaaaccttaacccaaaagaaaagcgttacggctaaaaaaaacgttacccgtaaagaaacgaaagtggcttatgggcgacatcgaaatagcacgagcaaaaaagcagcggcagaattactcgcgaataacaaactaaaactcagtccggcacataaaaagcgctatcagcacgccaaacagacggcgatgagtaagctgatgaaacaagttgggaaaccctatcgctgggggggatcttcgccgaataccgggtttgactgtagcggactcatttattatgcctacaaagatgtggtcagaataaaaatgccgcgcaccgcgaatgaaatgtaccacctgcgcgatgccgcgccggttaaacgcgcagagctggaaagtggcgatctggtgttcttcaatattgctaatcgcggcgtcgccgatcacgttggagtttatttaggcaacgggaaatttatccagtctccgcgtaccggcgaagaaattcgcatcagtatgttagataacgattactggcaaggccattacgttggggcgcgccgcgtcgtgacccctaaaactattcgctaaaactatttgctaaacgtactcgttaaaatcatgctctcaaactttcgctccgccggtttattggccgtcggagcgtttctacccggctctcagcccctgtgttccaccaatcgaataacccatcgccaatcactttaactctgtgtggttaaacctggttttccagtgggaaattgataatattgatacccataacaactatatgacaattatttatccgctcgtcgccaccgggatcgccctggcgcatccggtgatttgatgggcaaacaccctgagtcatcccgaaaggagaaagcaatgtcttttgaattacctgcactgccttatgcaaagaacgcccttgagcctcatatctcggcagaaacgctggattatcactacggcaagcaccacaacacctacgtggtaaacctgaataatttgattaaagataccgagtttgctggtcaatcgctggaagagatcgtaaaaacctccactggcggtatcttcaataacgccgctcaagtatggaatcacaccttctactggaactgcctggcgccaaacgccggtggcgaaccgaagggcgcagtagccgaagcgatcgccgcatcttttgggtctttcgcggagttcaaacaacagtttaccgatgctgccgtgaaaaactttggcgcgggttggacctggctggtgaaaaaaccggacggctcgctggcgatcgtgagcacttctaatgcagcaacgccgctaaccacttcggataaaccattgctgactgtcgatgtgtgggagcacgcttactatatcgattaccgcaatgcgcggccgacttatctggaaaacttctgggcgctggttaactgggcgttcgtagagaaaaatctggcctgattagctggctaatatcaagggcggataacggctccgcccttctcgctcaaaatctgtacagctctaaaacagtcagggtttagttcattaccgctgtaaagctaaagatcataatcactgccaacgaaccaatagtagtaatcaatgacattttcagatcagtatccatataaactcctcagtcggttaatttgggtggataaaggcacatagttagtgtgtaaaacgattttcccacagttcgagaataaaatcttgttatcattactcactttataacgttgattagatctttcactttttctttaaatcggccaaaatccgcagttcattactgcgtaccgaccaataacgcctaaaaacccctttcagactagcgcgctgacgaaaataaccagcggaactgatgatatctgtctgaaagggttcgaacaacgcaggcaaacgattaacataatacttacctgctgtaacaggtcagtttaggagtcattctttttatggcaacgattaaagatgtggccaaacgcgcgggcgtttccaccaccaccgtttcgcacgtcatcaataaaacacgtttcgtcgccgaagacaccaaggccgccgtgtgggccgccattaaagagctgcactattcgcccagtgccgtcgcacgaagcctgaaagtcaatcacactaaatcgattggtttgctagccacttccagcgaagcaccctattttgcggaagtgatcgaagcggtagaaaatagctgctatagcaaaggctatacgctgattttgtgtaactctcataataatctggataagcagaaagcgtatctggctatgctggcgcaaaaacgcgtcgacggtttgctggtaatgtgttccgagtatccagagcaactgttgggcatgctggaagattatcgcaatattccgatggtagtcatggattggggcaccgcgcgcggcgattttaccgactccattattgataatgcctttgaaggcggttatttggctggccgttatctgattgaacgcggtcatcgcgatattggagccattccggggcaactggctcgcaatactggcggtgggcgtcatcagggctttatcaaagcgttggaagaagccaatattaaactgcgtgatgaatgggtggttcaaggggattttgaaccggaatccggttataaagccatgcatcaaatcctaacgcagaaacatcgcccaaccgcggtattctgcggcggcgatattatggctatgggcgctatttgtgctgccgatgaattaggtttacgcgttccgcaggatatttcggtgatcggatatgacaatgtgcgaaatgcgcgctatttctcaccggcactgaccactattcatcagccaaaagaacgtttgggcgaaagcgcctttgcaatgttgctggatcgcattgtcagcaaacgtgaagatccccaaaccattgaagtacatccaaaactggttgaacgccgttctgttgctgatggtcctttccgcgattatcgtcgttaaaaccgctgtgggaagccgtttagcccgttgaaacggcttcccgcgtgttttctacaccgtcccccgctcgcagccattcggcattcagcgtttccgtatccccaaggtactccagcagccacgccatagcgggcgaatggttgttttgctcccagctcaggcagcaagggctatctggcaagggctgagccagcgtaataatcaccagtttcccctgtttggccagcggctcgacgcgatgcgccggaaccataccaatacataaaccgtcacacagacagtcaatgcccgtttgccaatccggtgccaccagccgtcgctggttgtccagcgtccaggtatcgcgcttcggcagattacgggcagtgtcctcaatgcagagcgaagggtaaggccgcagctgatcgtcggtcaaagggccgctctgagatgccagcggatgagtggcactgaccacgcagtgccagttcataaaccccatatcacggaaggtaaagcgcccaccgactggcaccgcacgcgtcgcaccaatagccacatcggcacgaccatccgccagcgcatcccacacgccgttgaatacctcaaaatgcacccgcagttcgatatcggggaaatgacgataaaaatccagcaccaactgacggctgcgtaacggcttcacaataatgtcgatagcaatatccagatggccgcgccaaccgttagcgacctgctgacattgacgacgcgtatcaatcatttttttgataacagttcgcgcttctttaataaacagcgctcccgctgccgtcagttccacatcgcggtgtcgtcgttcaaacagtggcactgccagccatgtctcgagttgtctgaccgtatagctgacggcagaaggcacgcgatgcagttcttgtgcagcagcgctaaaactaccggttctggcaaccgcatcaaccacttccaatgaatattccgaccacattgccttgccttcaattattttcacaccagtatgcaaatattaccgtttcacaggggaatagccagccggatagaatgccccccgcattaattctcctgcaaagataacctgctttcggattgtagccaggcggcaacgccgcgaatcccaaggaaccgagccactaagtgactggggtgagcgaaggtagccaacaccgctgcggttcgaaagataacgggtatacagataaacgagataaataacgaaaatgaaaacatccactagctttatgttctacctcgccggtctgagcatgttgggataccttgccacggatatgtacttacccgcttttggcgccatgcaacaagatttgcaggcttcggctggctcgatcagcgccagtttgagcatttttctcgccggatttgccattgcacaattagtctggggacctttatccgataaattggggcggaaacctgtgttgttgctcggtttaagtctgtttgccttcggctgtttgggaatggtttgggtgcaaacgccggtacaactgttagcattacgtctggttcaggccgtgggagtttgttccgctgcggtgacctggcaagcgctggtgattgaccgttatcgcgatggcaaggccaatcgggtctttgccactattatgcctttggtcgccctttctcctgcgttagcacccctgctgggcgcctggttactgaaccactttagctggcgcgccattttcgtggtgctattggcgattactctgctgctgttgattccgactgctttattaaaagaaaagcaaaagaatgcgcaaagtagtgagagcgagaaagataatcttaacttctggcagattattaaatcgccgctattcagcggaaacgtgatgattttcgccgcttgcagcgctggtttctttgcctggctaaccggctcaccctttattttgggcgatatgggctatagcccgaatgtgattggcctgagctacgtcccgcaaaccctggctttcttgctgggtggttacggctgtcgcagcgcactgaattacatgaaaggcaatactctgttaccgtggcttctggttggttacgctttaagcatgatcgccctgtatctggtggcgaccctaacagaacctaacctgctgactttattaattccattctgcgtgatggcgctggtcaacggtgcctgttacccgattgtggtgtcaaatgcattaattccttttcccaataacaccgggaaggccgctgcattgcagaataccctacagctgggaacctgttttattgccagcatgttggtgtcagcctttattactcaaccgttattagccaccgtgaccgtcatggtgttgacggtattatttgcagcgctgggttatttcatacatttatatgccacaaataaggatgactctgataatcaaagagaattaatctcagagagtcatcattcctaagggaaattatttcagcctttctaacgcgccgagacagatttattattgagaaacctttccggcgcgcctatactcgatcccagttataaataaagccgttagaaaaaagtcatattagtttcatattttgtacacgttgatcgcgttacatttatccttaaggatgagtgaacctagtgccaaacgcagtagatttacttcttaatcttcctctgtccgtagttggatatcagacaccaaggtagccaatacctattcggtatgcgcctgcaattttttcgtttattgcgggacatcagtcagaagaaagtgatggagaaactatgagttcatcctgtatagaagaccaaagtattcaagaaaatccgtggtatcgcattgtgaatgaaatgttgagccaggccgatattgaaatcaatggttcaagacctttcgatattcaggttcataatcctgatttctttaagcgcgcattgcagcaaggctcgctgggactcggggaaagttatatggacggatggtgggactgtgaacgactggacatttttttccagcgcgtgctacgagccggtctggaaaagaaactcccccgccatttcaaagataccttacgcgtcgcaaccgcccgcctgactaacctgcaatcgaaaaaacgcgcctggatcgtcggcaaagaacattacgatctcggtaacgatctgtttagcagaatgctagacagccacatgcaatattcctgcggatactggaaagacgccgccaatctggaacaagcgcaggaacataaactgcgcatgatctgtgaaaaactgcggctgaaacccggcatgaaactgctggatatcggctgtggctgggggggattatccgcttttgccgcccgtcattatggcgtttccgttcagggcgtcaccatttctgccgaacagcaaaaactggcgcaagagcgctgcgccggactggatgtcactatcctgctgcaagactatcgagatttgcatcaacagtttgaccgcattgtttccgtcggtatgttcgaacacgttgggccaaagaactatccaacctattttgaagtcgtcgaacgcaatctaaaacccgatggtctgttcttgctgcatactattggcgcgaaccgtagcaatctgagcgttgatccgtggattgaccgctatatcttccctaacggctgcctgccttcgattcgacaaattgccgacgccagcgagtcgcggctcattatggaagactggcacaattttggcgctgactatgatcgcacgctgatggcgtggtacgaaaaattccgcgccgcgtggccagttttgtctgaaaaatactcggaacgatttgagagaatgttcagctattacctgaatgcctgcgccggtgcgttccgcgtcagagatattcagctatggcaggtattgtttagcccgcgcggcgttgatggcggtctccgcgttcctcgctaacgtctgattcacgggatcaaaaaaagggatacggccaaggctgttatcccttttctttttttcaggccgattaaagcagcatttgctccacagcgcggcgcttgcttcgattcagcgctgtaatgttaagattgcgctttagccgccatgtcactggccaaatgcgccgccgcgccggcgatatcccgctgagccaatatacgttctaccgtttcgaccaccgcctgggtttgcggatcgatttcaatattgacggtctgccccaaacgttttttgcccaaagtggtgcgttccagcgtttccggaatcaaatgcacgcagaaacgtttcccttctacttcgccaatggtcaggctgatgccgtcgataccgataaagcctttgtgcaacacgtatttcatcaaatcttcacttggcatacggaaccagatctggcgattattttcagacgtgtagattttggcaatctcggcggtgcaggtaatgtggccagacatcaggtgcccaccaatttcatcgctgaatttagccgcgcgctccagattcaccatatcgccaacctgtagctgacccaaattggtaatgcgcagcgtttctttaatcaaatcaaagctgaccaaatcgccttccaccttggtcaccgtgaggcagcaaccgttgtgagacacagatgcgcctaaagccagctctggcaacatatccgtagggaatttgatgacgtgggtgcgaaaattggccttttcatcgatggccacaactggcgcggtggccttaacaataccagtaaacataggcaatgcctcttattcgttatctatagcgaggaaaattatcttgattgacctcagtttgccctagaaaaaccggaaaaccaattcgcgaaaggtaaaaatctgcaaggttatctacttcgttgataataagttacaaatgattgcttaagcttttagagacggtacaatatttgccctcaaggacgatattttatcatcgtaactattagcctgcttaatcccaacattattagaaaggtgtgtacttgcaaaagtatctaacagaagtccgctgcttattagcgctggctattccggtggtgatcgcctcggtatcccaaactgccatgggggtggtcgatactattatggccggctcggtcagtgccaccgacatggcggccgtcgccgtcggtacctcaatctggctccccgttatcctgttcggtcacggcctgctcttggcattaacgccaaccgtagctcaattaaatggctcaggtcgccgtgaccaaatcgctcatcagattcgccagggcttttggctggcgtcgatattatcggtgctgattatgactctgctgtatcacagcgaccatgtcatcacccgaatgcataacatcgatccggtcatggcagaaaaagccgtgggcttcttgcacgcgattctgtggggcgcgccgggttatctgttcttccaggttttgcgtaatcagtgtgagggattatccaaaaccaaaccggggatggtgattggttttcttggcctgctggtcaatatccccatcaactacatcttcatctacggtaagtttggcgcaccggcgctgggtggcgtgggctgtggcgtggcgaccgccagcgtgtactgggtgatgttcctgatgatgcgttggtatgtgaccaaagcccgttcacagcaggatatcaagctggaaaaaggcttcgcaccaccggattggcatgtaatgaaacgcctgagcggcctcggtttgccgattgctctggcgctgttttttgaagtgacgctttttgccgtcgtggcgctgttggtctcccccttggggattgtgccggtagctggacatcagatcgcacttaacttcagctcactgatgtttatgttacccatgtctctcagcgtagcggcaacgattcgcgtaggacatcgtttgggcgaaggctctgttgcagccgcgcaggtttcggcttataccgccatcgccgtcggcctgtgtctggcgatgatgacggcgatatcgaccgtgatattccgcgaacaaatcgccctgctctacaacaaatcgccggaagtggtgattatggcgtctcatctgatgctactggcggcaatttatcagctgtctgacgcggtacaagtgatcggcagcggcgtacttcgcggctataaagatacccgttctatcttctttatcacctttacatcttattgggtgttaggtttgccgagcggctatattctagccctgaccgattatgtggtcccggcgatggggccaagcggtttctggaccggtttcattatcggtctgaccgctgcggcgattctgatgacattgcgaattcgttggctgcaaaggcaacccgccgagtttattttgcagcgtgccgcacattaaactcgtcgcagttatgattcgggaaataaagttctaaaaaaacctgcgccgggttattccgcccggtgcaggaaaatccgaatcaaagctggagaaaaaaacgtcgcaatgagcgaaagctcagcaatcgcgtgaaattacgaataaaattgcgtttttctccttgccagaggacgggctgcccgttaatattcgtccccgccgtcacctttgatggccggtaataatcgatgcgtccgtagctcagttggttagagcaccaccttgacatggtgggggtcggtggttcgagtccactcggacgcaccaacattattatcaagcattggcagtagattgaatgatatgcgtccgtagctcagttggttagagcaccaccttgacatggtgggggtcggtggttcgagtccactcggacgcaccattcaaacatcagattgacaagattattcagtgcgtccgtagctcagttggttagagcaccaccttgacatggtgggggtcggtggttcgagtccactcggacgcaccaaatcttgattcttaccgcgctttctcattcattcttctcattctcaaccgctattctcatgacccgcaaaatgcttcaattcgtttttccaagttcctgacgatccagcgcattcacctcgattttattcgctgtatagcccctaatgtcacataaaatttacactctgtatgcttaatcactgactgttgcgcaacaaatcgcgccgagcgcctcagtttgcgctacatttgcgtgatttttatcaaaactggtgatgagaatttgattttcatttcatttccggtcacttacgccgtataatacgaaccgtcgtttcagttgaatggtttcagcatcttgatctatagatacgctaaaaaaatacaactcctcaattggctgtcgcagacaggcccagcgcgaagtcctgcgcaaaagttttccgctcgatctcttcaactgtcacctattcttagtattgtttcattacaccagacacgccccacattccgttccgtcagcctagctggcggattctttcgctttttatccatcacaacttgtagaaaaatccgtcatgaaaaagactaaaattgtttgtactatcgggccaaaaaccgaatctgaagaaatgttgaccaacctgctgaaagcaggaatgaacgtcatgcgtttgaacttctcccacggtgactatgctgagcacggtcaacgtatcaaaaatatccgtgcggttatggagaaaaccggtctgaaagcgggcatcctgctggacaccaaaggcccggaaatccgcaccatgaaactggaaggcggtaaagacgtggcgctggttgctggccagaccttcaccttcaccactgaccagagcgtgattggtaacaaccaaactgtcgccgttacctacgctggcttcgccgctgacctgaaaatcggtaacaccgtgctggttgatgacggtttgatcggtatggaagtgattgaagtcactgaaagcactgtcgtttgtaaagtactgaacaacggcgatctgggcgaaaacaaaggcgttaacctgccgggcgtttccatccaactgcctgcactggctgaaaaagacaaaggcgacctgatctttggttgtgagcaaggcgttgacttcgttgcggcttcctttattcgtaaacgttctgacgtgctggaaatccgtgagcacctgaaagcccacggcggcgaacacattcagatcatctccaaaattgaaaaccaggaaggcctgaataacttcgacgaaattctggaagcgtctgacggtatcatggttgctcgtggcgacctgggcgttgaaatcccggttgaagaagttatcttcgcgcagaagatgatgatcgagaaatgtaaccgcgcgcgtaaagtggtcatcaccgccacccaaatgctcgattccatgatcaaaaacccgcgccctacccgcgcagaagccggcgacgtagctaacgccattctggacggtaccgacgcagtgatgctgtccggtgaaagcgccaagggtaaatacccgctggagtccgtgagcatcatggcgaccatctgtgagcgtacagatcgcgttatgcctagccgcatcgaatcactgaacgacaaccgcaaaatgcgtatcaccgaagccgtttgccgtggtgcagttgaaaccgcagagaaactgggtgctccgttgatcgtcgttgcaaccggcggcggcaagtcagccaagtcggtacgtaaatacttcccaaccgcgactattctggcgctgaccaccaatgaagtgactgcgcgtcagttaattctgaccaaaggcgttatcccttccgtcgtgaaagaaattgcttctaccgatgatttctaccgtattggtaaagaagcggcattggcaagcggtctggcgcagaaaggtgacgtagtcgtgatggtttctggtgcactggtaccaagcggcacgaccaatacttcttcagtacacgttctttaatccaactcgggttgttctgctgaatatatttaaacgccgcttattacagcggcgtttttcttttatctttttgttcccgtcctttctcaaaaaacatttaatcccaccccggttacaggctgttttataaataagacttgtcccatggagtacattggttttgtttttattttttaacgattttttaaaaccagacgcttctttgagcgaacgatcaaaataaagctcattaacataaaaaatttattctctttcgaaaaaagtttgtgtaatacttgtatcgctacatggagattaacttaatctagagggtgttaataatgaatcgtactaaacttgtactgggcgcggtaattctggcttctactatgctggctggttgttcaagcaatgctaaaattgatcaactgtcttcagacgttcagactctgaacgctaaagttgaccaactgagcaacgacgtgaacgcaatccgttctgacgttcaagcagctaaagacgatgcagcacgtgctaaccaacgtctggacaaccaagctcacgcttacaagaagtaatattacttcaatgaaaaatggcgcacattgtgcgccattttttttaccccgaacaatcccctcaccttcgtcatttgcactttatccttatccggtaagtcgatttatttatctgctggaacaatgaaagcatccttgctttcatcttgtcccgcaacgtcgaggcgtttatttgcggtgattagtgggactcagaatagattgggcctggctgagtaagcttagggatagtctgttcttcagcctgtgacgcttccagaggggctacagcagccggagcggcatcagaggctaccattcctttgctggctaatactggcatcccagaacggcgtacaatcgcactttcaaccactgcggtatctgtctcgccatcggccataaaggctttcacaccggcactcagcgcgattggcatggtttgcggatcgtcattgtctgtacgggacagcggctggtgaacttctacgtagcgtttaccgtccggttcaacagaatatttgatcggctcattgataatctgtacgcgggtgcctttaggtaccgagttgaacagcgcctgaatatcgtcaggacgcagacggatacagccagagctaacgcgcatgccgataccgaagttagcgttggtaccgtgaatcaggtactcaccggcaccggcagacagacgcatcgcaaacagacccataggattttccggaccggcaggaacaacggccggtaaagtcacgccttgcgccagatagtgcttacgaatattcgccgttggcgtccaggttggattcgggattttctgactgacggaggtcgtcataattggggtgttacgccctaactggccgataccgattggataaacgatgactttatcctgaccttttggatagtagtacagacgcagttctgccaggttaatcacaatgccttcacgcggggtgtctggcagtatcatttgcgttggaatggttaacactgaacccggcttaggtaagtacggatcggtgcctgggttggcttccagcatacccaatagaccgattttataatcggcagcaatagcctccagcggacggccatcgtttggaacggtaaaggtagtattttcaccaataagacgactattggccggtggcagaggatattcagttgcattggccgcagtgatactgcctgccatacaggtggcgaataacatacctatcaaagttaatgcacgtttcatgcttagttcctacatcacttcttcaaattcggtttatacggcgagctagttcgtgtgattttcatagccaataattggcaaaactatactaacagtaatgattctaaaggcaatttatttctctaaaaatcaaggtgttagaaattaatttttctttgcctttttcgccccccagacaagatttaacctgctgaaatatcaccgttttaacactgtgactgacttcgcaaaaatatttttataacaattatgggtgaatagattaataaatgattaagaaggttctgagaggcagacacgctgcctcggaagaaaggtcactcagactaataatgatgctttattacgaattgcgcgaatcattgcttccaatccctgggatcgagatggcgttaaatgctggcttagagccaaatcggcaaaataagggcgaacgtccagatcgataatttgctgcggagttaacccctgatacagaataaagacgaccgcaactaacccttttacgatagtcgcatcgctgtcaccggcaaaatgaatagtgccctgctcggtcaaggtcaaggtcatgctgatccacacctggctctggcagccgctaatcaggttttctggctggcgctcggtgtcgctcaacggcggcaacatagcgcccaattcgatcacgtacaggtatttttcttcccaattatggcagcgggaaaaattgcgaatcaatttttgcttatctggcaacgtggccatggagaggcttcctaatacggtaaaaaataaagctgaccaagacgctagccagctttgataacggcaacgctctgaccaacaggcgctgcggagtttggctttacttagcctagcaaacgcttgacccgttgtaaccccgccaccagccggttgatatcctctcggctggtataaaccgccagagaagcgcggcacatgctcggaacgccgtagtgctgcatcaatggcatcgcacagtgatggccggtacgaatggcaatcccgtactgatcgagaaaacttcctacgtcaaaggcatgatgttgccccagattaaaggcaatgactcccgcccgtgacgctggaccgtacatgattaccccttcaacctgctgcagtgcttcgacggcgtaggccatcagctcatgctcgtagcgctgtatgttatccagccccagttcgctcaggtagctcattgccgcgcctaaccccatcatacccgcggtgttcggcgatccggcctcaaagcgccccggcgcatcagcgtaggtggttccttcggtcaggctgacggttttaatcatcgccccaccgccttcccacggcggcatttgctgcaacagttcgctttttccgtacagaataccaataccggtcggtccatacagtttgtggccggagaaagcataaaaatcacagcccagtttctgtacgtccaccgcctgatgcatcaccgcctgagcgccgtccaccagcaccagcaaaccggcggccttggccgttgccacgatttgctcaatcgggttaaccgtacccaatacgttggaaacgtgagtcatggccagcaaacgagtcgtatcatcgatcaggtgcggtagaacgctcagatccaattcgccgctcgcggtaatcggccagacgcgaatttcaatgccgcgctcctgagccagcatctgccagggaacgatattcgcgtgatgctccatttcggtgatgataatactgtcaccagctttgaggaaatgtcgcccgtagctgtttgccaccagattaatagcttcggtggtacctttcacaaaaacgatttcatccggcgagttggcatggataaattctgccgcctggcagcggacttgttccatcgcctgagtcgcctcagcgctgagggtgtgaattccccgatgcaccgccgcatagccgctgcggtaaaactctagctcgcgctcaatcaccgcattgggtttctgcgcgctagccgcgctgtccagataggccagcggctggccgttgacttcccgggcaagcaatggaaaatcggcgcgaatgcgttccagcgggtaactcatagttgttctctcatcattattctcccgccagacgctcggcaatccgctccatcaccagtttacggatggtttcgttgctcatcgcttcggtcaattccgcagcgaaagcaaagataatcatttgctgagcatcggcctgactgataccgcgggactgtagatagaacagctgttcggcgtcaatccgcccgacggtcgcaccgtggctgcacttcacgtcatcggcgtaaatttccagctgcggtttggtgtccacctctgccagtttgctcaacaacaggttgttattggtcatctgaccgtcggttttcagcgcgtgctgtgccaccttgatcatgccgttaaacacggccttgccccgctcccgcaccacggttttatgtagctgacggctttcgcaatagcctttattgtgttccagataggttcgggtatcacaaacttcgcggccaataggtaacagcaggctgttcatcgataaacttgcgccctcgccgttaagctgggcgctggtgttatggcgagtcagaccggcacccagcaagaaactgtagcttctggcgcgagcgtcacgtcccatcaccacgtcattatgagcaaagtgatagctttgcggcgtttcaaaggccagcttgcagtggctcagttgggcattgtcgccgacagaaatggtcagccgcgcgccggtaaagtgaggcaaatcattcaggctgacataatgctcgacaatatcagcctgagtattcgcttccagcatcacatggtggcgatagtggctggtattcaccagctcagtatctgcaccagagctgatatgcagcagatatagcggtttttccgcctgttttcccgctggcagacgaatcactgtgccctcctgcgccagactttccgtcagatgcaggaatacctcagattgcaccggggcaggcaattcggaggcagcagtcagtgggctaaccagataaacaccgaattcggtatcgctcaggctggcgtcgaaacggccgtccacaaagaccagacgataggcgtctagcggcagcgccagcgcggttaactgctgtgagctaacctgtgtctgagcaaagccaaaacgttgttcaagcaagtggttaatcggcgtatatttccagtcttcatgctttgcggttgggaaacccaacctctgagcctgctgccaatggctatcggcacgcccaccgcgagcgccttgctgtaccaattgactcagttgctgcagtaccgtagcactgttctgatgcgggttattactgttggtcggtaagccagccatagccttgctcctccaactgtttgactagcgagaagtcaccggacttgataattttgccctgatacagcacgtgtacgaagtcgggcttcacgtaatccagaatacgttgatagtgggttacgatgatgaaagcacgtttttcattgcgtagagagttcaccccgttcgccacgatttttaacgcatcgatgtccagaccggagtcggtttcatccagaatgcacagatctggctccaacgccgccatttgcaggatgtcattacgttttttctcaccgccggagaaaccaacgttcaccgaacgagtcagcaaatcttccggcatcttcaacagttcaattttttcttcaatgaaatcggaaaaatcgaagcgatctaaaggttcttcttcacggtatttacgtaccgcattcacggccgtttgcaggaagaaatggttactgacaccgggaatttctaccggatactggaacgccaggaaaaccccttcaccggcgcgttcttccggatccagcgccaacagatccttacctttaaagatcacttcgcctgcggtgacttcatattcttcacggccggccagcgtggcggacaaggtacttttacccgagccgttcggccccatgatggcatgaacttcaccgggtttgatttccagattcaggcctttgaggatctcgttgccttctacgctgacttttaaattcttgatgcttaacatgctgtttcctttgtgcgccgtggcgcaacgctgtgcggtgcaaatgccacgggattaacccacgctgtgttccaggctaatggcgagcaatttctgcgcttcgacggcaaattccagcggtaattccgagaagacatctttacagaatccgttgacgatcatcgagatagcgtcatcttcgctgatgccccgctgcagacaatagaacagttggtcatcgccaatcttggaggtggtggcttcgtgttccaactgagcgctgttgttgcgcacttccacatacgggaaggtgtgcgcgccggaatccggcccaatcaacatcgagtcgcactgggtaaagttacgggcattttccgcactcggtaggattttcaccagaccacgataggtattctggctatggccggcggaaatccccttggcgataatggtggatttagtatttttgccaatgtggatcatcttggtgccggtatcggcctgctgataaccgttggtcaacgccacggagaagaattcgccgatggagttatcgccctgcaaaatcacgctcgggtatttccaagtaatggccgagccggtttccgactgagtccacgacatttttgaaccttccccttcacacagagcgcgcttggtaacaaagttgagaatgccgccggtgctggccgtaccggcaaaccagttttgcaccgtggaatatttcacttcggcatttttgtgcagaatcacttccaccaccgccgcatgcaactgataggtatcacgcaccggcgcagaacagccttcgatatagcttacgtagctgtcttcatcggcaatcagaatggtgcgttcgaactggccggttttcgccgcgttaatccggaagtaggtagaaagctccatcgggcaacgcacgcctttcggcacgtatacgaaggtgccgtccgaagccacggcggcgttcaatgcggcaaagaagttatctttggcgggcactacactgccgaggtatttgcgaaccagatccgggaattcctgaattgcttcaccaaaagagcagaaaataatcccgtggccagccagtttttcacgataagtggtggcgaccgaaaccgaatcaaaaatcgcatctaccgccacttccgccccttcacgaaccggaacccctaactgggcaaaggcgttttccacttctgcggtgagataatcattggcggcggtgccgagatcttcgccgtcggtcggctgctgcactgcgccgggttgggaaccgcagttgtcatcgcagctaccgcaagatggtgccgagtaatagctgtaatcctgataatccaggctttgatagtgggctttcagccaatgcggttcttccatctccagccagcttcgataagcaccgagacggaattccagcatccactcaggttcgttacgtttggccgaaatcgctcgcaccacatcttcgttgatgcctttggccaactcatcggtggctaaatgggtaaagaagccttctttgtaacgaccatcactgacccaagcctgcacatcatctggaacttctacattgcttcgtgtcatttcgtttacatcactcaaacgccaaaactctcgccacaaccgcaggcatgctgagctttaggattattaaatttaaagatctgattcagcccttcgcggacataatctacttccgtgccatcaataaaaggcatcgcttttaacggtacaaaaattttggcttcgccatgctcgaaaaccagatcgtcattggcagggttttttgccatgtccatcacgtaggcaaacccggcgcagccggattgtttaacgcccagatgcagccctttcacttcgggatcttgctgcattaagcgggcaatctgcgcggcggcactgtcagtaatggtgacgccctgccaatcattgtcgtcgagtgaaaatgtaccaactgtatcctgttgcatatgacctaccttatctatctcaacaaccttattagttgttattatgctggttgaacctcactcggcgtcaacacagattgttcacaatggtagtgataataattatcacttcaaccgtttgttttgcagggatattaagaaaagtgcctttttaaccccgggtgaggcggcaacctataaggaacgctgcgatggccagaaaaaacggaagagagtcgcacaatattatcattatgaaatcacacaatatatttcataataataactgaaaaccctgcattattagaggccaatttccctttacttctaataattttaaacattcataggaaatacctatttctacgctaactttagccgaaaatccccctcggaggaaacctctacggcaaaaagtgaccgatttgatcgtgaaaaaataagccgttcgcgggtaagggattgaatgaaaggaaactgtgtctgacaaggattaagaaatattcagaaccggcgctgtccggttctgaaaataccgcttcagattaggcaaaatgaagacagacgctagctgcctaaaattgccgtagtgagacgtgatgtacagcaaagccgatcctgctgatcgaaaatctcgatctgccaaacctgatgagtacggccagcgtgaaccgcccgacacacgccgcgaaccaccccttcccgcaccgctctcaggtggttggcattaatttccaaccctaccacctgttgatcacattcggtggatagataacccgccattgagcccagcgattccgccaacaccacagacgccccgccgtgcagtaggccaaaaggctggcgcgtgcggtgatccaccggcattgtcccttcgatttcattgtccccgatgcgggtaatttcgatgcccaaatgggacaccatgcaaccttcacccacttgattcaagtctgccagcgtagctgctcgtttccaaagcattaaactatctccaatagagcctgtaacggatgcctgaggctatttccttccattcgttttacctggctacggcatgaataacccgttgccagacagcgtttttccggcaatttctgcaatgcctgctgccatgatagttcataaattccgatcgagttatggagattcttcgattcgtgaccgtaggtgcccgccataccgcaacagccaacgctgacgttttccagccgcgcgccgtagcgtgaaaatatccccgcccactgctgcccgctggccggtagcgcggtgctttcagtacagtggccaaacaaataccaaggttcatcgttcaatggctgcgctgggctatccggcaatgtcgtctgtaaccattcatgtaccagttgcaccttaaagtgaccgcgacgctctccaagcatttcctgatattcatcgcgatagcacagtaccaaggccggatcgacgcccaccagcggcatgcctaataaggaaattcgattaaggaactcggcggttttagtcgcagttttagcgaatcgctgtaaaaaacctttgatatgttgggctttaccattaggcgaaaacggcagcaagaccggattaaaaccgagtttttctaccaatcgaacaaaatcagccaccacctgtgcatcgtaataactggtaaaaggatcctgtacaattagcacatgatggctacgttcttcatcactcagtttttccaactgttccatcgtcatcgtgctggcatagtggccggaaagcgcctgtttcagggtcggcgtcgagagcagcggtaaatccaccatcccaatactccggcgactcagttcgctcacccacggctgtttcaggaagaaattgaacaggttgggcgccttggccatcagcggcgtatagctttccacgccagcgaccacgtaatcacgcaacggacggtgataacgggtgtgatacagctgcaggaagcgcgaacggaaccccggcacgtcaattttaatcgggcattgagtcgaacaggctttgcaggccagacagcctgacatcgcctccttcacttcatgggagaaatcgtagtcccctcgattggcgcgccagctatgtctggttttttcgatcagtccacgcaggctaggccggcgattagccaggccgttttccagtaccagaggatcgacgccctgttcgctcagcaaacgcagccattcccgcaccaatgtggcgcgacctttcggggaatgaatgcggttgccgctgattttcattgaaggacacatcgggctgcgagcatcgaaattaaagcataatccgttgccgttacattccattgcgccgcggaatgacgtgcgcaccgtcagcggaatttgtcgatcctttatgccgcgttttgccgaggtatcgactttcatcatcggcgcatcactgtctaacggagaacagattttccccggattcaggcgattgagcggatcgaaagcagacttaatgcgccgcagctcgtgatacagtttttcaccgaagaaacccgggctatattcagcgcggaaaccttttccgtgttctccccacagtaagcccccgtaacgcgcagtcagctcgactatccgatcggaaagctgtttcatcagcatttcctgctgcggatcgcacatgtccaaagccggacgcacatgcagcacgccggcgtctacgtgaccaaacatgccataactcaggttatggctatccagcaactgacggaattcgacgatatagtccgccagattttgcggcggaacgcaggtatcttcggcaaaaggaatgggtttagcctgacccttactgtttccgagcaatcctacggcttttttacgcataccgtagatgcgctcaataccggccagatcgtcacaaatctgatagccaatcacaccgccctgctgcgtagacatcaattcatctaaccgctgacacaacgaggccatttgctcgtcgataagttcccgatcatctccggcgaattcgacaatattcagtcccaatagcgtcttatctggcacatcggtgatcaattctttaactgaatgccacacaatgtcttctctggccagattcagcaccttagaatccaccgtttccaccgacagcgccttggcttccaccatgaaaggcgcattgcgcaaggccgaatcgaaggaatcatatttaacgttcaccaaacgccgcactttcggcagacgggtaatgtccagcttggcttcggtaataaaggccagcgtgccttccgacccgcatagaatacgtgttaaatcaaaagattgcagatcatcactcaaaacatggcgcagatcgtaaccggtcaggaaacggttcagtttggggaatttttccagaatcagcgcgcggttatcccgacaactctccagcacgctacgataaatacgcccaattaccgactcctcggcggcgatcgcttcggcctgagcagttggcagcgcgcgagtatccagcagttcgccccccaaaagcaccgctcgcagacctaaaacatgatcggacgttttgccatacaccaacgagccttgcccggaagcatcggtattaatcatgccgcctaacgtggcgcggttgctggtagagagttcgggagagaagaaatagccgtgcggacgcaaatattgattaagttgatctttaatcacaccggcttcaactcgcacccagccttgctcagtgttgatttccagaatgcgattcatatggcgggacatatccaccacaataccggtattcagtgcttgaccgttggtgcctgtgccgccgccacgtggggcaaaggtcaaagattgaaacgtcgattctccggccaaacgaccaatcagggtgacatcggcggtggatcgcgggaataccaccgcatcgggcagcaattggtagatactgttgtccgttgccatcgtcaggcggtcggcgtaatcggtggcggtgtcgccggtaaaaccgtgttgcttcaatgccttcaaaaagtccagcaccagcggtaagacgccaggggcctgagaaatccgtgggatcattatggttgaccctatctatgttgttttcacacacgccatccgccgcgcatcaccctgtcacatcagcgaatatacgtactccagtggcagaaaggttagccgcttgttaatgctcttgtcgaatcatttatgacaattcagaatgatgagaaaggcttggctcattgcagggaggaatagaataataattgattaacgatcaacattttatattgccctgccaacgaacagatcaactcgcatagagtgtaaaaaagcccacgtcagaaactttcaggcagcaaacgtcgcggtaaaaccggcgttgtaaaacacgaatacggggttggcataagaagatgtaaaccattccgcgccgctggtgccattagcgtcgagtctagctctgcggcattctctctctataacgcgatacctctgtgatatttctctcaatagaacgacatcgctgtaacaccggctattccccgaaccaaatgattcgcgaatgaatctacctcacaaaataagcgtgcttttattactcagctccgtcagtaaaaatgctatgaatctgttaaattacgcaaaaatacaccatgattagacagtcagtccgaatacggcgaccttgccctacttatcgaaacgagaactcaccgatgaattacccgcaacaacatcgttacgacttacccaaactcatatttggcgtgatattcattttgataatgatcattgccagcttctgggtggttcaaccctttattttggggttcgcctgggcgggaatggtggttattgctacctggcctttattgattcgtttgcaggggttactttggggacggcgctcattagccgttgtcattatgacactgctgttaattctgctgttcgttatcccaattgcgctgttggtcagtagcgttttggaaaatagcgctccgttaattaaatgggccagcagtccggcgaatttacagataccggaaatggcatggctaaaatctgttccgatgctcggtaacaaactctacagcagctggcataccctgatagccggcggcggcaatgcgctaatggcgaaagttcagccttacgtgggggaaaccgccacctggtttgtggctcaggccgctcacgttggccgcttcctgctgcatctgactctaatggtgttattcagtatcctgctgtatttccacggtgaaaacgtcgcactggggattcgccattttgccgttcgtctggcagataaacgcggcgatgctgccgtcatactggcggcgcaagccattcgggccgtagcgttgggcgtggttgttaccgcgctggtgcaagggattctgggcggaattggactggctatcgccggcatcccctacgcgatgttattgacggtagtgatgtttgtttgctgcgtcgcgcaacttggccccttactcgtactggttccggcggttatctggctgtactggagcggggacaatacttttggcactctgctattggtctggagctgcgtagtcggaacgctagacggcgtgctgcggccagtgctgatccgtatgggcgcagacctgcctatgatcctgattctgtctggcgttatcggcggtttgctctccttcggcatgattggcctgtttattggcccggtggttctggccgtctcatatcgcctggtgagcgcctggattcatgaagcgcctgagccggtagaagatgtcgccgaagtcgctaaacacttagatgaactctaatagcacaatggctcgttggtaatactggcgagccattattttctcattccctccttgcccaaataatagataaagctttaggttcaacactctccattcttttttcacgttaagaaactcaagtttattaaaacagcattgttattcactataaaaccgcccacactctttcatttagtcactgataaacaaccgtttttattaggatgattcttaatgactatctaacttattttatttaagattattattaatcgacaactcatttgagatgtttaaataaatcagtagattattgctttatcgcaatatcagcaccgaataccctaattgctgtgtgtagtctttgcctatctcctatgatgggcttttttttgtcttccgcgccaaataatgaattattgcctctcacccttatattcccaatcaaaaacagtttctaaaggttataaaattccagaaaaaaatccgcagcctaagctacggatcttcaaagaatgacgtaccttagatattaatgggttacaggtttaacctgccccaaatccatccaggtttgcactacggtatccgggttcagagacagactatcaatgccctgctccatcagccacagagcaaaatcggcgtgatctgacgggccctgcccacaaatcccgacgtatttaccctgccgttttgccgcctgaatcgccatcgacagcaaggctttcaccgcctcgttgcgctcatcaaacagctcagataccacgccggaatcacgatccagccccaacgtcagctgcgtcatatcgttcgaaccaatggagaatccgtcgaaatgttggaggaattgatcggccaataatgcgttcgaggggatttcacacatcataatgactttcaggccattctcaccacgtttcagcccttgcttagccagttcggctaccaccgcctccgcctgcgccacggtacgcacgaatggcaccatgatttcaacgttggttaaccccatttcgttacgcacacgtttgacagcttcacattccaaggcgaaacaatcacggaagctatcggccacgtaacgaccggcaccgcggaagcccagcatcgggttctcttcatgaggttcgtaggccgcgccgcccaccagattggcgtattcgttggatttgaagtcagacagacgcacgatcacgcgttttggccagaaagccgcacccaacgtcgaaatgccttcggtcaggcggccgacgtaaaactcaaccggatcgtcgtagccgtgcatcagcgctttaatttcagcctgcaacgccggttcctgcttatcaaattccagcagcgcccttgggtgcacgcctatcatgcggttgataataaactccagacgcgccagaccaaccccttcgtttggcaaacgggcgaagtcaaaagcacgatcaggattaccgacgttcatcatgatttttaacggtaactcaggcagttcggtcacttcggagctttgcactgaaaagtccagtagatcctgatagacaaagccggtatccccttcggcgcaggatacggtcaccttctggccttcacgcagacgatcggtggcatccccacaacccacaaccgcaggaatccccagttcacgggcaataatcgctgcatgacaagttcgccccccgcggttggtgacaatggccgacgcctttttcatgataggttcccaatcaggatcggtcatatctgtcaccagaacatcaccgggctgaatgcgatccatctcgctaatatcatgaatgactttgaccggacctgaaccgattcggtgaccgatagctcgcccttcaaccagcacttcgctctggttgttcaacaggtagcgttccatcacttgttcattggaacgaacggtttccggacgcgcctgtacgataaacagcttgccggtgtgaccgtctttggcccactcgatatccatcgggcgaccataatgctgctcaatcagtaaagcctgatgagccaaggattcgacttctttatcggtcaaagcgaaacgattgcgcagatcttctggtacatcttcaatacacacctgtttgccgtgttcttggctatcggcatacaccatacgaatttttttcgaacccatattgcgacgaacaatggccggtttgccattacgcagcgtaggtttgtgaacgtagaattcatcaggattaaccgcgccctgcaccaccatctcacccaaaccgtgggcggcggtgataaataccacctgatcaaaaccggattcggtatcgatggtgaacatcacgccggacgaggccagatcggagcgcaccatccgctgaacgccggcagacagcgccacgccgcgatgatcgtaaccctgatgcacccggtaggagatggcgcggtcattaaacagggaggcaaacacatgtttaatcgccaccatcaccgcatcgataccctgaacgttgaggaaggtttcttgttgacccgcaaaggacgcatcgggcatgtcttccgccgtcgccgaggagcgcacggcaaaggaggcttccggctcgccgtcggcaagctgttgataagcttcatgaatagcttgttcaaactcaggatggaacggcgtatcaatcacccattgacgaatctgggcaccggcgttagccaactgcgcgatatcatcaacgtcggtgttatccagcagctcataaatacgttggttaacgccactttgctcgagaaagtcgttaaacgcctcggccgtggtggcaaatccgttgggaacagaaacgcccagttcagaaagattggttatcatttcacccagggaggcattcttaccgcccacacggtcaacatcgtgcataccaagctggttgtaccaaagcacattacgcagggttcggccattgttcgacatctaaacaatccttttacattcagtagggtacgaataaaagttatctttgctgttaaacagcagggatcagactagcacaatgctccgttagctatggacaggtgaatcgatcaacccaacacaaaaaaattttttaagggcaattctgcggcaaaagctttacccaaaacgggaataaggcacactatcagacagatcacagatgattattcgggcagtggcttaaaggagtcagggtggaaagaagcgttttttatatttcagacggtaccgccattacggcggaagtcttggggcacgccgtgctatcgcagtttccggttgatgccacgacctttaccttaccttttgtcgaaagcgccgcccgtgctgaagcggtttgccagcagataaatgagatttatcagtctaccggcgtccgcccgctggtgttctattcgattatttcgtcggaagtccgcgagataatccaacgcagtgagggattctgtcaggacatcgtccagtcgctggttgcgccactccaggacgaactgggcgttgcgcctcagccggtgctcaaccgcacccacggcctgaccgaaagcaatttgggaaaatacgacgcccgtatcgccgctatcgattatgcgctggctcatgatgacggcatttcgttgcgcaatctggatcaggcgcaggtgattttgctgggcgtatctcgttgcggtaaaacgcccaccagtctgtatctggcgatgcaatttggcattcgtgccgccaactacccttttattgccgatgatatggataatctgcagttacctgcggcgcttaaaccctttcagcacaaactgttcggtttaaccataaaccccgagcggctggcagcaattcgtgaagagcggcgggaaaacagtcgttatgcctctttacgacagtgtcgtatggaagtcggcgaagtcgaggcgctgtttcgcaagaatcaaatccgctatctaaattccaccaattattccgttgaagagatatcgaccaaaatcctggatattttaggaatgagtcgccggatgttttaaggctgcattcatataaatgattgaatataccgaattcgatataaattctattaatctcctctgcggcggttgaattcgtctggttttggtttattgtgatcgccatcacttcccggtattcctgccgcagagaagaacatttttagagaatatccatgcataaaacagatgaactgcggaccgcgcgcatcgatagcctgatcacgccacaacagttggcggataagttgcctatctcttccggcgtagccaataacgtgaccgcgtcacgtaagcgcattgaaaaaatcctgaccggtgaagatcctcgtctattagtggtggtcggcccctgctctattcacgatctggatgctgccattgattatgctactcgcctgaatgtgctgcgggaacgctatgcagatcgactggaaatcgtgatgcgtacctatttcgaaaaacctcgcaccgtggtgggctggaaaggtttgatctccgatccgacgctagatggctcctgtcaggtcaatcttggcatagaattggcacgtaagctgttgctgagcgtgaatgaactgggattaccaacggccaccgagtttctggatatggtgaccgggcaatatattgccgatttaattagctggggtgccatcggcgctcgcaccacggaaagtcagatccaccgtgaaatggcgtcggcgttgtcctgtccggttggctttaaaaacggcaccgatggcaacacccgtatcgctattgacgccattcgtgcggctcgggccggtcatatgttcctgtcgccggataaaaccggccagatgaccatctaccaaaccagcggtaacccttacggccacattataatgcgcggcggtaaacaacctaattatggcgctacggacattgccgctgcctgtgatagcctgcgtgaattcgatttacccgagcatttggtggtcgatttcagccacggtaattgccagaaaatgcatcgtcgccagttggaagtcgccgaagacatcggtcagcaaattcgcgccggttctacggcaatcgtgggtgtgatggcggagagtttcctggtcgagggcacgcaaaaaatcgtggccggacagccgttaacctacggccaatccatcaccgatccttgcctgaactgggtcgataccgaacatttattagcaattctgaatgacgccgtgaatacccgtttctaacctgccccaaccgacaatccgcgttaatcattaatgcttcaaatttagccagttcagatgtcatcaggcatctgaactggttgattttttctgaattccctcaggcttcaacgctgacttttacatgaaataataaccccaattgttaaataaattgggctattcggctgtcgcctcgtcttttgcatcagaagcgttattttgtatataattttttctttttgtaattaatgagatagaccagagacagcaggaaatcaaaaaagttgtccaaggcaatattttgcttgatgtaacctcccattcacatgataatgattatcaaattgataaccatttccgtttgcatctaatgaataaccctacttacagcgatttgtaccctgcaacggctagcggagcagaagattctctcccgctggtggagcaacctgcttgcatcaatagcgagcaactgcttggtagacatggactcgtcatcatcaaccatcaaggacaattttatcagctgcggcagaccaaatccggcaagctgatattgaccaaataataactgctccttgagatactttttcgcgagccacccagatcgttcgatcgaggcagccagcaatctaatgattatgtttaactacatatggagaattgccagatgtctcgtgcttcatctacgttgttccgtgcgtcatcgctgagtttggctatcgcctgcgccattccttcgctggcctacgccgcgcctaccgcaccgagcgaatccgctgccacaacagaaacagccaagaaaaaagcggtccattccagtgaaaccatgaccgttgtcgccacgggtaacccgcgcagtagctttgacgcaccgatgatggtgacggttatcgaaggggattcgccgctcagccagacggccagcacctcagccgatatgctgcgtcgcgtgccaggcatcctgatttcaggcacgggacgtactaacggtcaggacgtcagcctgcgcggctataaccgtaacggcgtattgacactggtcgacggcatccgtcaaggcaccgacaccggccatatcaatagcaccttcctcgatcctatgctggtcaaacagattgaaatcgtgcgtggcccagcggccatgctatacggcagcggcgcattgggtggcgtaatctcctatcaaaccgttgatgccgccgatctgctggagccgggtcacagtagcggttaccgcgtatttggcttaggtgccaccggtgatcacagcttgggcatgggggcttctgccttcggtaaaaccgatgatttggacggtttgatttcctttggcactcgcgacgtaggtaatcttcgccaaagtaatggtttcagcgcgcccaatgacgaagcgattagtaacgttctggcaaaaggcacctggatcatcgatgataaccagtctctgagcaccaacctgcgctattacaataaccgcgcccgggagccaaagaatccccaaacgcccgccgcttccgccggtaacctgatgaccgaccgctcgaccattcagcgcgatgcacagttgagctataagctgcatccgcagggtcagaattggctggacgccacggcaacggcctactactccgatgtcaatattgataccaccaccaggggcaccggctttgaaggccgcgagcagaaaacccacggcgcgaaactggaaaatcgcactcgcctgttcgctgacagcgctgcatcgcacctgttgacctacggcaccgaagcctatcgtcaggaacaaacgcctagcggcgtcaccaccagcttcccgcaggctaaaatcaactttgcttccggctgggcgcaggacgaaattactctacgcgatctgccggtgaccgtgctggcgggtacgcgtttcgacagctacagtgccagcagccaaagcaatgccgatgttgacgcagataaatggtcgtcgcgcggtgctgtcaccgtaaacccaaccgactggctgatggttttcggctcttatgcccaagcctttcgcgctcctacaatgggcgaaatatataatgattccaaacacttctcgatggggccatttaataactattggaaacccaatccgaatctgcgccccgaaagcaatgctacgcaggagttcggttttggcctgaactttgatggcgtattagccgagaacgacagcctgaaattcaaggccagctattttgatacgcaggccaaagataaaattgagatgaaagtcgataacctcacgaccacctctattaatattcaccgcgccaaaatatggggttgggatgccactatggattaccaaaccgattggtttaactggaatctggcctataaccgtacccgtggcaaaaatatggataccggcggattcctcgacagcaccaatccagacaccgtcaccagcgcattggatatcccgattgcctcgacaggcttctctgcgggttgggtcgccactatggttgaacgtaacaatatcgtgacccgcaacaccaaacagcaagccggttacggcgtcaatgatttctacattagctataaaggccgcgatcagttcaaaggggtgacgaccaccgccgtgctgggtaacgccttcgataaagagtattactcaccacaaggtattccgcaggatggccgcaacgccaaactgttcgttagctatcaatggtaattcatacccaggtatgaattaccccgtctaaattacctgagccagactcgattctggctcaggtatttctcaacaggagagaatgaatgtcagcaatactgtttacccaatatgagcaagctaaactcgacaatccaggcaaatttgcacgcgatctggcagagatccttggtatcagcgaagcggaattgacccacgctcgcgtaggccacggtgcagagcgcctgaaggtggatgctcggactctgctgaccgaactggaagcggttggcgtgaccaaatctattactcgcaataactacgcggtacacgagcaaatgggtcgttaccagaatcagagcctgaacggccacgccggtttgatcctgaatccgcgtgagctggatctgcgtctgttcctcggccaatgggataccgttttcgctctgcgtgaagcgacgaagcacggcgaacgctttagcttccagttctttgatctgcaaggtaatgcggttcataaagtgtataacactgatgagaccgacatggctgcatggcatgctttggtcgagaaatacggcaccgctaacaacccggagatcgttattcagcctaaggctgactccgctgaagtgacaccgaatgacaatcatcagcaaatcgatcaggaatggcgggcaatgaccgacattcaccagttcttccagttgctgaaacgtaacaacctgacgcgccagcaggctttccgcgccgtcggcgacgatttggcttatcaggtagataacagtgcgctggagcaaatcctgaacgcggctaaagaacaacaaaatgaaatcatgatctttgtcggcaacggcggctgcgtgcagatcttcaccggtcagattgaacgtgtcatgccacacattgagaaagaagcgcctttccaagaatggattaacgtttacaaccgtcgcttcaccctgcatttgattgccagcactattgccgaaagctgggtaacgcgaaaaccgactaaagacggtttcgttaccagtcttgaactgttcgccgcagatggcacccaaattgcgcaattatttggtcagcgcagcgaaggtcagccagagcagaaccaatggcgcgagcagattgccgcagtggcaaccaaggacatcgccgcatgaaaaactggcttctgacattaacattggcgctgccactgaccagtgtcgcggccgaccgcatcgttaccatcggtggcgatgtctctgaaattacctacgccttgggcgtaggttcaaaaatggtcgcccgcgacagtaccagcctgacccctgtagccattcgcagcctaccggacgtaggttatatgcgccaactcaatgccgaagggattctggcgatgcagccaacgctggtgcttgccagcgaactggctgaaccctctctggtgcttaaacagttgaccgacagcggcgtgaaagtggtcactattcccggtgataccacgccagaagccgtaccggaaaaaattgccctgatcgccactgcggtcaatcaggcagataaaggccagcagcttagccaaacttatctgcaaaaactggcctcggttaacactaccgccctgccggtcaaaatgctgtttgtgatgagccacggtggcgttgcgcctatggccgctggccagcagaccgctgcggacgcgatgattcgcgctgcgggtgcgcaaaatgccatgcagggttttaaccgctatcgcccgctgtcgcaggaaggcgtgatcgccagcgcaccggatttactattactgaccaccgatggcgtgaaatccctcggcggcctcgataaagtctggcggcttcccggcctgtccttaacgcctgccggtaaacacaagcgtgtgttgattctagatgatatggcgctgctgggctttggcctggaaacgcctaatgtgctgctcaagatacgcgcggcggcggagcagagtaaatgagacgatacttgccacccggttatgcgctgggcggcctgctgacgctattggttctactggctctgggttccgccaatatgggggctttaacgctgtcgtttcacacgctgtggaacagctcgctggacgacgcctcttggcagatttggctgaatattcgcttgcctcgcgtactgttggctatcgtggtgggttgtgcgctggcaacctcaggcgcagtgatgcaaggtttgttccgcaacccgctggccgatcccgggttactgggcatcagcagcggcgcggcgttgttcgtcgctatggttatcgttctgcctttcagtattcccagcgtactggctttttacgggcatattatcgccgcgtttatcggcagtgtgctaatttcgctgctgattttctccctcagccgctttggccacggcaatctgtcccgattgctgttggccggtatcgccattaacgcgttgtgcatggcggcaattggggttctcagctatctcagcagcgatcaacagttgcgtcaatttaccctatggatgatgggcagcctgagtcaggttcaatggccaaccttgctgatcgccgcttcgttagtgctgccagcctgcgctgccacgctattccaggcgcgcaaactcaatttgctgcaattaggtgacgaagaggcgcattatcttggcgttaacgttaatcgcactaagctattgctgttactcctcagcgcattactggtaggcgccgccgtggctttgagcggcgtaattggctttatcggtctggtgatccctcatctgattcggatgcgtttaggtgccgatcatcgctggctgcttcccggtgcggccttgggcggagcctgtctgctgctgaccgccgatactatcgcccgcactctggttgcgcctgcggaaatgccggtagggttgattaccagcctgatcggcggcccttacttcttgtggctggtattacgtcaaccggagcgcgcccgtggataattcagcgtactcatctcattcgaatcaaccgctattactggatgcgcaaagtctgtgtttctctttaggtggacgtcagctcattcaagacgtgtcattacagattcgcagcggcgaaatggtcgccattatcggccctaacggggcgggcaagtccacgctgatgcgattgctcaccggctatttacccgccagcagcggcgattgccatatgttaggcaaatcgctggccagttggccacagcagcaattggctaaaacccgggcagtgatgcgccaatacagcgacctgaaattcccgtttagcgtagaagaagtggtgacgatggggcggacgccccacggaaaactacaggagcacgaggcagtacaacaggttatggaacaaaccggctgtaccagcctggctaaacgcgattatcgccagctttccggcggtgaacagcagcgcgttcagctagcgcgcgtgctggcccagctctggcaacgcgcgccatcaccccgctgtttgttcctcgatgaacctacctcggcgctggatttacaccaccagcaacacagtttgcgtttgttgcggcagctcacgcaggaacaaccgttgtcggtatgttgtgtcctgcatgatctcaatttggctgcgctgtatgccgatcgaattttgctgctgcatcaaggccgattggtcgccgcaggtacgccgcaggacgtcctgcatactgacatactaacccgttggtatcaggcggatttaggcgtgtacagtcatcctgaaaatcagttgccacaggtttatttgcgacagtaatccccttcccgttatctaacctgcgcatatgattttcagaaactcatactgcgcaggttagcttagatattcgcaagccaacaccattccccgtatgtgttcagatgatttttaccacacgtttaaggggtaacgaattaaaacttaacggttaaaaccaaacgggtaacggtgtaaccgccgcgttgcagataaacaggcataaaaaaacggaggctaagcgctgccactttgtcctccgttcgactctcaaccggccatatttgaaatatccatattcgcggttcttctagctggagcaggatatctccagatgctttccccaatctggcggcaaagcggccagatcgtcatattcggcattatcagcaaatggccgttgcaacgccaaatgcagcctgtgcaacgcgctgatatcgtcattttctgccagctcaatcgcttgctgagccagataattacgtaagatcagcttaggattcactgacttcatcgcctgctgccgttgagcgtcatcaatagtttcttgctgtagccgcgtccgatattgcgaataccatttatcaaaggcatcccgatcgacaaagtcatcccgcagtggcgaatgagcggaagattgctccgtttcactgaggcgacggaacgtacgggtgtaatcctgtttttctttcatcatcagactcaataaaccagtcaacaaatcgttatcctgtttatcggtagtgaaaaaacccagtttggcgcgcatttgctgcccgtaggccgccatcaacgccggttcgtaggcatccaacgcctgctgtagctcttccgccatcagtaatccggatagagactgccccaaacgatgtaaattccagtaggccaccgccggttggttatcaaaagcatagcgtccctgatggtcggtatgattacaaatatagtccggctggtaatcatccagaaaaccgaacgggccataatccatggtgataccaagaattgacatattgtcggtattcattacaccgtgagcaaaacctaccgtttgccaggacgcaatcattctcgccgtgcgctctaccacgtcggtgaaccaagccagataaggcctggcttcgtcagctaaattcggccaatggcgggcaatgacgtaatcagccaattgtttaacctgtactggctgctggcgataatagaaatgttcgaaatgaccgaaacgaacatgactttccgccactcgcaacaacatcgcaccgcgctcaggctgctcacggaataccggattctcgctggtcacaatggttagtgcacgactgctggcaatccctaaatgatgcagcgcttcagaggccagaaactcacgcactaccgagcgcaacaccgcccgcccatctcccatgcgcgaataaggcgtcagccccgcgcctttcaggtgccaatccagctgacgaccatcgctcagttgctgttcaccgagcaaaatcccccgaccatcacccagttgtcccgcccatacgccgaactgatgaccgctatatacctgagccagcggatccattcccggcagcaattgttccccggcccaaaccttggctttatcaccggagaaccaactgtcatccagctcaagttctgctgccagcgatgcgctgtgatacagcaaacgcgcgccttttaacggtgttggccgcaaacgggtataaaatccgggcaacgcccggccatagctgttatcaaaatccggcattacatcagttcctcaaccagccaacggcgtagttcaactaattcagcctgtgaatcagggaaatcagcgatcagcgtctgacatagggcgtccaccgcttcaggacgataagctacacccggtaaccgttcggccaatgtttccagcggggttggattcaggctatcggtaaatacttggctgcgttcgatagaacctcgcaatacatctaaatgcacttcaacaccgccccactgaaaacgagtgtccatttgatgattaaaggctggcgcctggccaaaattccattcccagctactttggcgggcaaactgctcgctaaagccgggtaaatccggcaaggctagtggagaaataatttctgcctgcgcccgttcgtcgtagtaatcaaagtaggattgctctatggctctgcaaatctgctcatgatcgatacccggtatcagctcgaccagattggcgacccgcgaccgaaccgaagcaatgcctttcgcctgtagtttcttaggatcgggattaagataatcaaccagacgccctaaattggcgtttatcaataaggtaccatgatggaagccgcgatctttggtttcccgataagcagagccagaaactttacgctcgccaccttccgtgacaacgaccagatcattacgaccagaagccgtggcgtcgatccccaatgtcttgagggcattaagaataatttgagtggaaaccgttttatcgtattcaggtttgcctgccataaaggtaaagcaggtgttgcccaaatcgtggaataccgccccaccgccgctgctgcgacgcgccagtttaataccgtcttcagccatacgccgcgtattacactctttccacggattctgagcgcgaccaatgacaatggtattatcgtttcgccagagaaaaagtacccgctgatccggcgacatttggcggaaaatacagtcctctacagccagattaaaccaaggatcataggaatcagaaatgaataaacgaagggatggcataaagggctccgcaccaaaataaacagccgttaagataacacagttgcggctgtttatcggcggttagatgcggcgcgcctgccagtaaacgcgtttccagtacacgttttctaacgaagaacggatgacgcctttactggtggatgcgtgaatgaattcatcattagtatcgtaaataccaacgtgcaatccattccctccactgcccgttttgaagaacactaaatctcccggcatcagctcatcgcgagagactttggtacccagactggtttgtgcttcagtggttcggggcaactgcatatcaaaacgatcgcggaaagtgcgatagacaaagccggagcaatcgacgccgcgctggtccattccgccatattggtaaggcgtaccctgccattgacgcaattgctcttttaactgtgcgaccaccacaatcgggtcagataggtgtccgctgggtgccggagctctgctactacacccggcaagaataagacaggccagaaaaatccaaaaacgcatccgcatagatctctcaccgaataataagcccggttggctttccttgagcggaaaccataagaaaaccaagctatcatgctgaattcatctggctaatctatatttcgtgcgcgcaaaaaacaagttatctgaataagataatagtgctaaagctatttaatcggcttcgaatgtattaaccaaacgccaaacaggataatggcggctcccagggtctttaataacgtggcgctttcgtggaaccaaggcaaagtcaccgccgccagataaaccagcgcataactaatacttaagagtggataagcctgatttaatggcaaataacgcaaagcgaagaaccagcacagcatcgaaagcgcatagccgaataaacccgcagtgacggcggcaagtggcgacagatgatcggtgaagaattgcagatccatgccagcccagctaatcagcggtaagtgaatcacaccccatttcagtaatagctgcgccaacgtcaccaacagcacgctacctattccccaaccgtaacctttcatcgcggcaaactcatcagcaaaatacccaacataatggcgacaatacctagccaatggcgcaagccaacggcttcaccgaagaaaaagcgtgatgccagcgtaaccaagacaaaattaaaactgagcatagggtaagcgatgcttaaaggcaggtgttgcagcagccgaagccacagcaacatccccaatccgagcaacagcaccgccgtagctagccacctaaaggtgtgagtacgacggctcggttgttctgtagcccaaatctgagccgcctgcttttgacatagctgtccggcgcaggtcagcagactcaccatcaataacagcaggtaactcatcatggaatttgcttataccacagcaacgccattctgctgttttgcgtaacctgatccgccgcaggcaggctttctggcaaggtttcacctcgggataactgtaagaccagcgaaacattcccctgtttacgcgccttagccagccattgagggaaatcttcaaaactgacgtaacgatccgccgcatccggataggctaaaccataattcacttcgcctttttcgctaaacataatgatatcactacgtttcaactcccaggccagacccgaagccacgccgacgccatccgagagtacgtagcggctttgttcaagctccgcgcggttctgctggataaaatactgaggcagcttggagttaatcacctgttgcggaatgacatacgccaccagcaacgcaaacagcagcgggcaaacggccgcccagcgccaatggcgagcattttgtcgcaggctgaaatagccaacgcatccccatgcagcaaatgacagagtcccgagaatcactttgattttctcatcggcggcgtacaccaccaggtgagaaaatacgcccaaaccgatcaacagtacggccaacgcgcagacggtgccgaaaatcagattgatatagccgtttaccttcagcgcgctcatctgcaatttagccacacaatcctgcgcgtacgctgccataagcaatgatatcggcgcaatacacggcagaatataggttggcaattttcctttggcgatgctgaaaaatataaacggcatcactgcccagctcagcaggaagaagagttccggtcgagccactcgctcacgccagcctttgagtaatgcccccggcaacagtcctaaccaaggtaatacgcccagacaaatcagcggtaggtaataccagaatggcgctttatgctgcgcgtctttctcggcaaagcgctgaatatgctccacccagaagaaataatgccagaaatcaggttcacgctgcgcaatcgctaacgcccaaggcaggctcagcaaacaggcactgacgatagctatcgggccaaacaacagtagctctttggttcgacgttgttgaattacaatgggaataaccgcaatcaccggaacggccaatgccaaaaagcccttggtcataaagcccatggcacaaaccagccccaaaaatgcataggcggtcattttctgtcgggaagttttggctctcagcgtcagataaaaacacagcatcgatgctgtcagccacagcgtaatcataggatcgagaacgctataagtcccgatactgaataccagcagcgaagagatataaatcaggctagccagcagcgcggtattacgattacgccacattaatgtcgctagccaaaataccaaaatggcgctgagtccaatactgaatactgaaccaaaacgcaccgcaaagttattatcaccgaagatccactggctgatattattaaaccaatatccggcaataggcttttcaaaataacgaatacccaataaatgcggcacgacccaatcaccctgctgtagcatttctcggctaatttccgcataacgggtttcatccggttgccacagtaaacggccgttcaagggcacgatatataacacagcaaaaaataccgccagtagcgctacgccacccttttttaacgcgtcgctcatgaatttgtcacctcagactgacagcctaaccacccctctctgcctgggaaagcagaacgcacgaccttgcctagcggcaagtttgaacgattttccggtaacaatgagcttaaagcgcaaaattcaattccctgcttctgcgctttcactaatagattttcaaacatcgctgcctgtgacatcccttcaacttcggcgtgaatggtataaaccggcactccgctatctcgcagaatggcatccagaataaaatcgttaaaatcctgcggacgaacttcactgccgacgacttcatcgtaagtcggtaatgtcacggggatttgtacgctgccttcactgccatcaggcaatattggccggaaaggacgcgtgccgcggcaatcgctgttatagctgaagttaaacggctgtttcgcttctaatactcgctcgtcggcgcgccacccggcgaccgcagagcaactaaccggcccgtggatactgtcttgcaatgcatccacaccacgctgaatctgatctttgagctgtgctttcgaccaggtgccgactttcgcctgccagccctgatgatcccaagcgtgcaagccaacttcatgaccggcagcctgcgtttctttcatcacgtcgcctaaatgtttggcaattaacttgcccggccaggcggtaccggccagcagaatctgccagccgtacagcgaagctgcgtttgagcgcaacattttccataagaaacggggacgtagcaggcgccataaatggcgccccatgttgtccggcccaacgctaaaaaagaaactggcctgaataccgtgtttatctaacacattcaacagtgaaggcaccccatcgcgggtgccacggtaagtatcgacgtcaatcctcaggcccactcgtttcatttagccttcccatcatcctgttcaatggatttatcgtccagcgcgctgcgcaggaagaagtccaacgtttcggcgacagtttgctgcatggcgatttcaggctgccagttcagcaaacggcgggcgttttcaatgctcggcgtacgatgttcaacgtcctgataccctttgccatagtaagcgctgctttcgatggttttcatgccagcaaacggcgggaatttgtcgcgcaattcatgtttctcaaagctggccaacagcatttcagccagttcacgaatgctggcttcgttagtcgggttaccgatattgataatctgaccgtcgcaacgtccttcgcggttttcaatgatgcggaataaagcttcaataccgtcgttaatatcagtaaaggtacgtttttgttccccaccgtcaaccagtttgatcggcgaaccttccaccagattcaatatcaactgagtaatggcacgggaactaccgatacgagcagcatccagattatccaaacgcggccccatccagttaaacggacggaataaggtaaatttcagaccttctttttcgccgtatgcccaaataactcgatccaataattgcttggagacagaataaatccagcgctgtttattaatcggcccgacaatcagacgagaatggtcttcatcaaactctttgtcatcgcacataccgtaaacttcagaggtcgacggaaaaacaatacgtttgttgtacttcacgcagtcacgcacgattttgaggttctcttcaaaatccagttcaaagactttcagcggattacgggtatattcaatcggcgtggcaatagcgaccagcggtaatatcacatcgcacttcttaatatgatattcaatccattccgagtgaatactgatatcaccttcaacaaaatggaagcgtggattatccataaagcgacccagcgcatcggaaccgatatccagtccgtaaacttcgtagccgtcatcacgtaataaacgttcagtcagatggttaccgataaatccattgacgcccaaaatcaggactcgggtgcgtcttttctttttatttagcggtttaacccctaaacggacatcggctaccatccccatttccaatgccagacggctgccctgcacgtacagtccggattcgccctgaccggcgatgatttcaagcgcgccctcaccgcaggctaccaccaatggattggtgccaagtacggttcctggcaatttttggtgctcgatgtccagtggcctggcacgccatacaatcaacttgcgctgtcccaaatggctgaatgcgcctgggtaaggttctgtcaccgcgcgtaccagattatgtaattcgcgagcggatttaacccaatcgatttcgccatcggcggcggtacggcgaccaaaatagctggcgtccgcttcattctgaggcgttagtgttaacgggccacgcttcatttttggcaataaatcctgcaacagagcctgcgcggcatcgcgcatttttgcatgtaaggttaaagccgtatccgtatcgctgatagccactttacgctgacctgcgatgtcgcccgcatccgctcgcttcaccattttgtgcaaggttacgccagtttcggtttcacctttgaccaacgcccagttaatcggcgcgcgaccgcggtagcgaggtaacaatgaaccgtgcaggttaaatgcgccctgcggagccagagataaaatctcatcgctcaacaagttacgataatagaatgaaaaaatgacgtccggctgcatttcgcggatctgctcaacccataaaggatggttgacgtcttcgggggcaaacaccggcaattgtagatcggcggcaacccgcgcaacggaagagaaaaagtgattctcattcggagaatcagtatgggtaaacactgcctgaacgtcataacccgcttcaaccagtgcattaacgcccacgcagccaatatcgtgataggcaaatacaatcgctttcatcattcttcttcctgagtttttttggcctgctgagactcgaccactttttgcacaaaatatcggggacgcgcgcgtacgtcgttgtaaattcgtccgatgtattcaccgagtaaacccataccaacgaattgtgccccaataaacataaataacaccgcgaacagcgtgaacacgccgccgccagcccattccgggccaaaaatcaaacgtaatgccaccagcagtaccgagagggtgaaacctgacagtgcaatgacgctgccaaccagactgagcaaacgcaacggcgtagttgtcaggcaggtgatcaggtcgtacatcaggttaatcagcttcatcagactgtatttggagtcgccaaactcgcgctcggcgtgatgaaccttaatttctgtggtttttctggcaaaggtgttggcgagtatcggaataaaagtactgcgctcgtgacagtgtaacatcgcgtcaacgatatgccgacggtaggcacgtagcatacagccgtagtcccccatcgatttccctgtcgctttttggatcatcatgttgatcatcttggaggccgttttacggaacatagaatcctgacggttggcacgcactgtaccgaccacgtcataaccctcttcggcaacgctcactaaacggggaatttcttccggcgggttttgcaaatccgcatctaacgtaataaccagatcgccactgacctgattaaaacccgccataatggcagagtgctggccataattacggtttagcaagacggcaataatgcagctatccggtttttctgccgcagcggttagcatttctgccgaattatcgctgctgccgtcatccaccaaaataatttcataaggctggcgtaataactggcaggcagccgaggttctctccaataatgcgggtaaactttcctgttcgttataaacaggaataacaatcgagactttattaatttcttcaggctgtgacacggcgaggccctataatagttgctaatgcgttgaccacccggtcaacatcgctatcttgcatatcggggaacagaggcaaagtacaaagccgggctgaattccactcggtatttggcaaagttaaatcgggataacgttcgcgataatatttttgcgtatgagccgcacggaaatgcaaaccagagccaatgcccaaggcttttaattcagccataagttgatctcggcttataccgcactgctcggaatctacccgaaccataaataggtgccaggcgtgatgatgaggataatcaggcaatgccaaaggttgtaacggtgaacctgccaatgcctgaatataacgttcagccaaagcctgacggcgagcgtttatttccggtagccgtttcagttgcaccacagcaatagccgcgtgaatatcggataaattatatttatatcccggttcgaccacttctgcctgcgggctacgcccttttaactcacggtcaaaagcatcaacgcctaatccatgaaattttaagcgacgtactttttcagccagcacgtcatcatcggttgcgattaatccgccctcggcgcaggtcatattcttaatcgcatggaaagagaaaatcgccgttccttgctgccctatccattcatcgccgtagcgtgttcctgccgcatgcgccgcatcttcaatcagcggaatctgatgctgacgggcaacttgcctaatgctgtttaaatcacagggcgcgccagcataatgcaccggaataatcgccttggttttaggggtgatagcagcggcaatactttcagcgctagccatcagcgtgttccagtcaacatcgaccatcaccggaacggcacccaataactcaatcatattaagggtagaaacccaggtttgagaaggcgttatcacctcatcgcccggcccaacgcccagtgccattaaagtaatatgcattcccgccgtggcagaacagaccgctacggcatgtttgcagccaaaagcctggcaaaactcgcgttctaattgttgattcttcggtccggtggtaatccaccctgatgtcagaacttctgtaacagcagcaatttcttcactgccaatagcaggaacagagaaaggtaagaaattttccatgaatgtacccagtaggacacaacaaatttaacgccactataagtcgaagtaagttaacgaaaactaaacgcggccacgattgatctcactgcacaccactgataaatgtagacaatgaaccttaatccaaccttaagaacaggagaaaaaaacattattttgtggcgtgtgcacaaaatttagccagagttggcttaatgtaaatattctgatgaatcaagagaataaacttcattttttttgcgacacaacagcagacgaaggtgaatgtttaccgatttacgctcagtttcagtatagaaataaccgaaactcagaaataatcataatcgtataatttataaaaatagtttagctaaaataattaatttttgagtgacgtgcagggttaatcgaatgatcctatctccgtcattcattgcagtatcgcgttatttagagataagaagtaaagatggcgtgaattaagggacagaaaatagagaaaaagtctgttcaacatcggattaacgcaaaatgtataggagcagcaatggcacttctcccccatcatctgccaataacgatccgtttgaatgcgttttcactacaaatcaaaatatcaatgaacagccagaattaacgctggctgttcctatttcacttgaaatttcatgttacttactacatatgactaattttacaaaggtagacgtgcctctgtatgttaagtgataagctgactttttaaacgatgcccgttactgattttatcaaaaacgcccccaatctcgtactcgttatgggataaattcttcgcctgacgaatcacgtcgttataagttatcttcgttcctttgatattaactccatactcggttttttgagcttcaactaaaaatcttttaacctgatgtggatgtaaataggcagagaagcgaccaaatgttacacactggccttttttatccataccaaacacacgatttttttcgcttgcaagacccaatccaatatttaaataatcagtatttccaattagtttacccaccataccagcctcctcataacaacatgaaaaaaaagatatttacagaggaaaatcaagacctattcgttcaatacacgcatctgaaataaaccgttccattatggataacaaacttggtatatccattccatatagcgggagacgtagccaacagatcacatcatttttttcatcaaaggcaaaaaccggctgccataaataatctgttggcctatttttattcaacagagcaatcatttcctctaacgataaactgttcgccatacctactgaggtctgaagtatccaatattcttgatctatcgcgcatagattcaattgcaaagcatcatcgattgtcaacgtaatgatatcttgattttcagctatctcgggagcttcaaatcctatagcaaccaacaattcataagtaataagatgaaattgccttaaatggctcaccggtagcagccctcttgagaaaatttgacggagtgaccccttactaagcaataattgcattaaacatagaatccaatctataaaatatcggtactaccattgagttattatagtgaattaagtggaaaaattgagttaacctcgcctaataatggctaggttaacttcatttatatacgatataaaaattagggagtaattaataaccagaatagttaatgcaataattattaattctgacaaacaatccaattctgctgattaaaacggtgtaattgaaaattcacctcaaaaatcggtgataatatctctggtcgcatcacttccagcgtttcaccctgcgcaaccagttttccctgcgccagtagccagattctgtcggcctgttgcaggctatgattcagatcgtgagcgctgacaataacactgcgaccgctggcgcaaaactcccgtaacagcgcatctaacgcaactttttgcgccacatcaaggctattggttggctcatccagtagtaataattggctatgatgattcaccgttggccatacctgtaacaaaatagccgccagcctgacccgctgccattctccgccggaaagttgagtgagagaacgcggcagcttatcggctaaacgtaatttttcacagagataaccgatggctatcgccacggattccgaatccgcccctacgggctgatgcagagagaggtattgaaatactggcatcaggctaaccgacgtttgctgctgactgagataagcccgataccgtgctaattcagcgccggaatactgcgtaagaggcgttgcgagcagagaaatatcccccgtagtcggtaatacacccgcggcgcaggctagcaaggtgctcttccccgcaccgttcggtccaataagatgaatttgcaacccagcatcaacctgcgctgaaaacgaggctaatcggcccgcgacactgacatcgttgagttgcaataacgtcacaataatctcgttagctaataagttaagtgaaaatcagtgctgagccagcgcctgaacgatcgcggcaatgattgccggatcttctggcgtcatatccggtgagaaacgctgaataaccgtaccgtcccggccaatcaaaaatttttcgaagttccacaatatatcgccgatctgttttggtgctcgccccttactgctcatccgctggaaaaactcgctgtccgcaggcgtcaaagcctgtggcttagcggaaattaagtgttgatacaacggatgacggcctgagccattaacttcgactttactgaacatggggaattctacgccaaaggtgccccggcaaaatgcctgaatctcttcatcgctgcctggctcctgaccggcaaactcattgctcggaaatcctaaaacttcaaaaccttgttgatgataggttttgtacagtttttccagacctgcgtattgtttggtcagtccgcactcggaggcaacgttcaccaccagcagcacggagccttgataggccttcagcgacgtcgtttgatgatcgatagtgtgtagttgagtagcataaatcggagcggtcatcggatgtcatccttattatagagagtgaaacttttattatagagagctaaacttttaccgagttaaccctgagcgatattgatgcaaagtcctcttaaagcgactattagcaggttttccgttcacgactctacgcttttcaccctaatcagtaaccagataaatagcggagctcccagcgttgccgtcaccacgccaatcggcaattctgcggaaaacaaggcaacacgagcaatcacatcggctaacagtagcactcccgccccggccaaagcgcagcctgttaacaggaatcgctgatcggtcagcccggttaatcgcaaaatatgtgggattaccagaccgacaaagccaatcacaccggctaatgcaacgctgatgcctaccagcagaccaatagccaaaaccaatagattacgccacctatggagtgagaccccaagctgtcgcgcctgctgctctcccagcgccatatagttcaggattctaccttgcaggcaaagccaaatcaccactggcaataacagcaacaccagcaaccactgccgccaatctatcccgctaaaaccgcccatcatccaatacatcagctgacgtagatccagactggtactgaaataaaccgcccacgtcatcacagcactgcatacaatccccaaagctacgccaaccagcagcaatctggcattgcttaaacgtcggcgtcgggcaaaagccagcagcagcgaggtcatgaccaacgcgccgataattgcactcagactcagcacccacaccggcagcaatccgtgccctaataaaaccgccagcaccagcgtaacgccagctccgttcgccacgcctaacaatcccggctcggccagtggattttcgaacaggctttgcattatggctcccgctaccgccagactggcaccaaccatcattacggctaatgctctaggtaaacgcagttgccatacaaataattgtccatcggcgcttagccaccgattgggccatatccaaacctcccctgcgcaaagagcaagtgacagagccagtaacataccgcaggcgaggagtccgagataacgacgatcccgccgcagctgatgctgctggagtaagataaatgtctgacttatctgcataatattctgcaatccggctgacagaacatgactgggaaaacaggatcatgatccgagatagaaaaaggcttattgcctgggtttgaggacagatattagggggttagcaggataagtgaaagttttgcgtagcaagggcaaggattttattcgtaaatacattaattggcatcttcctatatgagagacacggcagcaaagcgtagaaactcattagcgagttcggcgagaataaaacgaacgcggaagacggggcggaagcagagaaaatcgcgtttctggctatgctagctataagattacaaaagaaaaaggccgcttgcgcggccttttttgtcggattactcactctttgggagtggcattctctacccggctttttagcttctgcccaggacggaaagtcaccacacggcgcgccgtaataggaatgtcctcaccggtcttcggattacggcccggacgttggtttttgtctcgcagatcaaaattgccaaagccagacaatttgacctgttcgccattctccagagcacgacgtacctcttcaaagaataactctaccaggtctttggcatcccgtttgctaagcccaagcttttcaaacagatgttctgacatttcagctttagtaagcgccataggttcaatccctcaaggatgcttggaatcgctgttttaacgcctctacacattttgcaacggtagcggcgatctcctcttcttccagtgtacgggcggtatcctgcaacaccagactgatagcgaggcttttataaccctcggctacgcccttgccacggtacacatcaaacaagtttacgccaactacctgatttgcgccaactttcttacactcggccaaaatatcttctgcgggaacgttttcagccaccacaacagcgatatctcgacggtttgccgggaagcgcgaaatctcgctggcctgaggcacggcgcggtctgcgaccttattccacaacaattcgaacaccacagttcggccgttcagatcgagcttacgctccagttcaggatgaactacaccaatgaaaccaatgtgttctcccgctaaataaattgcggcactttgacccggatgcagtgcggaatgcgattctgcacggaactgaacgtcagataatttgccggtaagttcaagaattgcttccaaatcacccttcaaatcatagaagtccaccggctgacgcgccaaatcccaatgctcatcataacggttaccggcaatcacacccgctagcattacgtcctgtcgaatacccaaatctgctttattatcaggaacaaagcgtaagccactctcaaacaaacgcagacgagattgctgacgattctggttataaaccactgctgctagcagaccagtcagcaaagacaagcgcattgctgacatatccacggaaatgggacttggcaaaatcagaggctcttgacccggatgcaataaagcctggatttttggatcaacaaaactgtaagtaattgcttcctgatagccgcgatcgaccaataatgccttcacacgcttcaatggcaggtcagcttcgcgatgtttggtcatcaccaaatctgcttttaccggcacatcagggatattgttgtaaccgtaaatacgggcaacttcttccaccaggtcttcttcgatttccatatcgaaacgccagctcggcgcaactgcctgccagttatcacactgcacagtcacctggcaacccaaacgacgcaggatatcggtaacctgttcacttggcacatggtggccaatcaggcgatccagtttttcacgacgcagagtaatagtggcgcgtttcggcaaatccgcttctgaagtgacatcaataatcgggccagcttcaccgccgcaaatatcaatcagcaaacgggttgctcgttccatcgccttatgttgcaacgcagggtcgacaccacgctcataacgatgtgaagcatcagtatgcaaaccttgacggcgcgctcgcccggtgatcgacaacggattgaagaaagcacattccagcaagacgttctgggttgcttcattcacgcctgaatgttcaccaccaaaaataccggccatagctagcgctttctgcttatcggcgataaccagcgtatctgcgctcagtttggctttagtaccgtccagcagcgtcagctcttccgcttctgcggccatacgaacaatgatttcaccgtcgatacgatccacgtcaaacgcatgcatcggctggcccagttctaacaatacgtagttagttacatcaacaaccggatcgatagagcggataccacaacgacgcagtttttcacgcatccacagcggcgtagcggccttaacgttaatccccttcactacgcgtcccagataacgtggacacgcctgcggcgcatcaacgcgaattgggaaggtatcgctgagggttgcagcaaccgggctcatatccggttcggtcagagctaactgattcactaccgcgacatcgcgagcgacacctagaatacacagacagtcggcacgatttggcgtcacgctgatttcgatagttttatcatttagttgcagatattcgcggatgtcggtgccaattggcgcatccagcggcaactcgataattccgtcgtgatcgtcagaaatacccagttcagagaatgagcacagcatcccttccgaaggttcaccacgcagtttcgcagccttaatcttgaaattacccggtaaaaccgcgcccacggtcgctacggcaaccttcagcccttgacgacagttaggtgcaccgcagacgatatctagcagacgatcgccgccgacattgattttcgttactcgcagtttgtctgcgttgggatgctgcccgcactccacaacttcaccaacgaccacgccgtggaatgcaccagcaacgtcatcaacgccgtcaacttccagtccggccatggtgatttggtgggctaattcgtcactgccaatggttgggtttacccattcgcgtaaccaaagttcactgaatttcatgagatatacccgccttacttaaactgtttgaggaaacgcagatcgttttcgaagaatgcacgcaggtcggtcacgccgtaacgcagcatggttaaacgctccatgcccatcccgaatgcaaagccggagtagatctctggatcaataccgacgttacgcaatacgttagggtgaaccataccgcagcctaatacttccagccatttaccgtttttacccatcacatccacttcggcagaaggttcggtgaacgggaaataggaaggacggaagcggatctgtagatcttcctcaaagaagttttgcaggaaatcatgcaaagtacctttcagattggtaaagctgatatcgcggtcgacaatcaaaccttccatctgatggaacataggagtgtgcgtttggtcgtagtcattacgataaacccggccaggaacaataatacggattggcggctgctggccctgcatggtacgaatctgcacacctgaagtctgggtacgcaacaaacgcgttgcatcgaaccagaaggtatcatgatcggcacgcgccggatgatgagccggaatattcagcgcatcaaaattatgatagtcatcttcgatttccgggcctgacgccacggagaagcccagctcaccaaagaaggtttcgatgcgatcgatggtacgggtaaccggatgcaggcccccgttttccattcggcggccaggcagcgagacatcgatagtttcttgagccaaccgcgcgttcagaaccgctgattccagcagttccttgcgcgcattcaacgcttcctgaacctcttgttttgcctgattaatcacggcacctgctgctgggcgatcttcggctggcagctcacgtagcgacgtcatttggagggtcaaatggccttttttgcctagatattcgacgcgcaccaaatccaacgcggcaacatcctgggcctcttctacggctgctttagctctggcaaccagctctgcgagatgtggcattgttttcctcttcctctggccggtatggcccgcttgtagttattaaactgctatttaaaccgctggataaaactgttttgtgtaaaattcgctctattgcgccctgtcctacaacggccaagacgttatcgaacaacaagatattgatcttctggcacatattttactgcgtgctgccagaattggaaaccttggttcaataggatcaaacacatacttgagttatagaaacaaaaaagcctccacggtgggaggcttcggcgctacttttcgtttcttttcttacgcgcaagcctcctaaaatcaggtgctaaagtaaaaaaagaaacggaaaataactgattgcatcattatctagccttacgaataacaaaacgctgttgaacgataaatctgttgactgattagttatcctgacaaaatttgccaaggttacaaagatcaaaagagggagcaagctccctctttcattctgacttacgccagagctgctttcgctttttctaccagagcggcaaatgccactttgtcgaatactgcgatgtcagcaaggatcttacggtcgatttcaacagaagcctttttcagaccattgatgaaacggctgtaagacagaccgctctgacgagcagctgcgttaatacgtgcaatccacagttggcggaattgacgcttccgttgacggcggtcacggtaggcgtattggcctgccttgatcactgcctggaatgcaacacgataaacgcgcgaacgggcaccgtagtaacctttcgcctgctttaaaatctttttgtgacgtgcacgtgctaccacaccacgttttacgcgagccatgtacttctcctatcgtcttaattcaaaccaaaaatacttatgcgtacggcagacatgccacgaccagacccagatcgttcttagataccaggcctttaggacgtaaatgacgtttacgcttagtagcttttttggtcaaaatatgacgcaggttagcatgcttacgcttaaaaccaccgttggcggtctttttgaagcgcttagcggcgccgcgtactgtcttaatctttggcattgaatatatccacttcgcattgttaattacaacgagctagctaggcgaacaggatcatagcgcacaaggtgccatgaaacctgttacttgaatgccttactgtctcttcttaggtgcgagcaccatgatcatctgacggccttcgatacgagtcgggaaggactcgacaacggccagatcagaatcttcacacaggtctttacggacgcggttaagcacttccataccgatctgctggtgcgccatttcacgcccacggaaccgcagggtgattttggctttatcgccatcttccagaaagcgaatcaggttgcgtagtttgacctgatagtcgccatcatcggtaccaggacggaatttgatttccttgacctgaataactttttgcttcttcttctgttctttcgtcgatttgctcttctcgtagaggaacttgccgtaatccataatacggcaaaccggcggctcggcattcggactgatttctactaaatcaacaccagcttcctcggctttttcaagagcttcattcagactgacaatgccaatctgctcaccatcaacgcctgttaagcgaacttctgtggcgcgaatctctttgttaatgcgattaggacgcgccggttgaactcgttttccgcctttaatactttattcctccagttgatgaagactacggctgcgaatctctgttagcagcttgtctacgaccacgttgacatccacgcttcccaagtctttaccgcgacgagtacgaacggcaactttgcctgattcgatctctttatcgccgcaaaccaacatatagggaacccgacgcaacgtatgttcacgaattttaaagccaatcttctcgtttctcaagtccgctttcaccctaatccctgcatcttgcagttttttggttacttcttggacatattcagcttggctatcagtgatattcatcactacaacttgtaccggagcaatccaggtagggaagaagccggcatattcttcggttaaaataccgatgaagcgctccattgaccctaaaattgcccggtgaatcataaccggaacctggcgatcgttgttttcgccgatgtaagacgcacttaagcgacccggtaatgagaaatcgagctgtacggtaccacactgccacgcacgatccaaacaatcatgcagagtaaactcaatttttggcccgtagaacgccccttcacccggctgataatcaaacggaataccattttcagtcagcgcggcggccaaatcttcttcagcccgagtccagagttcgtcgctaccgatacgtttttctgggcgagtagacagtttcaccacgattttttcaaagccgaaggtgctgtacatatcgtacaccatcttaatacagctatttacttcatcgcgaacctgttcttcagtacagaaaacgtgagcatcgtcctgagtaaagccacgcacgcgcatcaggccatgcaaagcaccggacggttcgttacggtgacagctaccaaattctgccatacgcagcggcaggtcacggtaagatttcaacccttggttgaagatctgtacgtgccctgggcagttcattggcttaatgcagtactcgcggttttccgatgaagtggtaaacatatgctcagcatagttttcccagtgaccggttttttcccacagtacgcggtccatcatgaatgggcctttaacttcctgatattgatactctttgagcttcatccgcacaaaggtttccagctcgcggaagatagtccaaccgtcgttatgccagaacaccataccaggcgcttcttcctgcatgtggtagaggtcaagctgtttgccgattttacggtggtcacgcttggcggcctcctccagacgctgcaaataggcgtttagctgctttttatcaccccacgcggtgccgtagatgcgctgcaacattttatttttgctatcgccgcgccagtaggcaccggaggttttttgcaatttaaaatgatggcagaagcgcatgttcggtacatgtggaccacggcacatatcgacatattcttcatgatgatacagtccagggcgatcgtcgcggctgatattctcatcgagaatcgccactttatattcttcaccacgggctgcaaaaatatcgcgagcttcctgccagctcactttcttcttgatcacatcataatctttgtcagcgagctcatgcatccgcttttccagcagatccaggtcttcctgcgtcagggtctgttccaaatcgacgtcataatagaaaccgttgtcgatagtcggaccaatcgccattttggtgtttggccacagctgcttgatagcatgtcccaacaaatgcgcacaggaatggcggagaatttccagcccttcggcgtctttggtggtaataatggctaattgcgcatcggattcgatcagatcggtggcatccaccaactcaccgtttacacggccagcgatacaggcttttgctaacccggggccgatatccatagcgacatcaagcacagaaacagctttgtcaaaatgacgttggctgccatcaggaagggtaattacgggcattctaattccttatttacagtggtgacccacacgacagatcacatgtaatatacaattattgtttgaattcaaagagttgcattcgcaatttaacccacgcttgttaaattggtacgcaacttggtacacatatcgttttgtgtcttctaactcgccacgaaatgagtaaccatattatcactactggatacaatgataaacacgcccttacctgccgaaaccagtatggtttttataaaagcacaaactcagatttaaggctggccaaaatcgaccagcacaagccagatccaaccggcgtccctgccaataaaaaattctaatccggcattgctggccactctatgcttttaccagtcgatatatccaatctcattaaagagattcgatactccttccattttgccaaatcatttgcttccgtcccttcaggcgaaccgctgtcaaccgcatcctgacgccattcaatttcactatcagctttggcctttagcgccgatctctgactagttgcctcagctagaacttcctctggcgtcatctctggtgcatcgacccaggctggtctgccctttaccgtccccaatagttttctttgtggtgcggcagtggcgtgatatatagtcatctcatcgtcagtggggatgattaagtctgagtctttaatttcaccgtagctaccatcatcgaccatattttttgccaaaaaccggcttgtctttttattaaataaatatgacatcacaacctcgttatttagtagccaaaagcaacccagaataaatccacaaccacagtatcagccgcattaacctcaaatgttgtgctggtgacgttcctcacggtttggtttgcctgagcaccagtggcggcagcactataatttcgagtggtaatgactgaaccggtataattggggaatgcagttggaaaggtgaccgtggagaatgatgttccagtagctaggcctgttgccttgccccactggataattaacccgcccggacggtctggtatcctgatgaaactattaccagtgaagtttatttttccaaaaagaatcattagccccggcaacgtgagaaccttatctgccgtaccgacggggatttctgccgaggttgctacgtcacgtgtggatgaattacccaatcctaagttaaccctggactggggtttgtccgaaaggtcattcagattttgcgtcttttgaagggctccagtaatgcgcgtgtcattgccggcggccacggtattagccgcactccccacatctaatgttgaagaatttccgaggcctaagttattcctagcggtagccgcgttagtcacatccgacaagttttttgattgagctagcgcataggataccagccctggaagagtaacaaccttgtctgctgtgccgatcggatagtcggatacaagcgccacatcccttgtggatgagttgccaagaccaagattggtccttgatgctggcttgctcgccaagtcagaaaggttggcgcttttcttcagagcatcagcagcggcggcagcggcctctgttaagccaaggttagctacagcagcagccacagctgcaggtccagcggttgctatttctgatagattgctagccgtctttaaatatccggttgataagttaaaccagttggtaggagtggtatttgggttggatttattaccattaagcctgtttataaatatggtctcagcatcattaccaagtattaccgcaccctttggatatccaccaattccttcattaaaatcagcgtcaaatgtatttaaagctccggcactgaaccatcttaataaattcgaaagttcataaagaatttggttcatatcttggcctttaggcggtaatccgccagcagcctttaaaaccatggttattggcgggaatcccttctcgtatgacgctgaattatcaccggatggagtgtcaggaataatggcctctctctggccattaattccaaatgggactggttgtttttttggttcgtcatttctgttcatttatatttctctgaaaaatgttccgtcgttaaatggatatgcgtcagatgaaaatccgaagtatggcggaactatttgatgtgtagtaataagaaccgcgcttggtatcggtaatacctcataattctcaagaattgacacttcatatggggctaaataaaattcacaaataacccccatcctcatatctccgtaatcaacgcaaaatgccctccctctacctttaaaaagtatggaaaggaatttatttatctctttaatagtcgcaatgcttatgttcgaaaatgccttacatagaatgagtgtcctgtatgcatcatccgacagccttactgtctcagtttcctgtactccggcatagaatggctcttcattgaatggcgaagggtatgacccgccgtcattggcctcagagaacccaaaactattggtatctattgacgccttaatatatctggatacattcactatcttcccccacacatcaagaccaaaagatccgcatgtgtttacgttccacacctctttaataaactcatcggtgaattcatctaaattcacagcctgattaaatgtatcgattatggaaaggagcttttcacttgctgaatattgagttagtaccgtgtctttccagctcacattagtgttacctcaatgtctgcctgttgaattgtaggtatctgatcaatacctgccgttagtgactgggaaaaatcaacaccatttcctgaaatagatattgaggatatattcacgtaatcaggggagatagatattatcggtgcgtaatacgttcctgagttaattctcccgccaattcttgcttttgttataccgtcatacccaccattaaacacggtttccaccatagacttaatttggctgcttatgtctgatggaagattttcattagtctctatttcaaccttaaaataaattcttaacggcgtagctttttgccactgtataatgtactgcgggtagggggcgttatagttttctttatcttcgacagtgaacgttgcattaccgttaagattagctcccggatttttagtagtgaatatagcctccgcgacatcagcgtccacgccaccataaacacaggcatatactgagtgacgcaataccgggaaatttgtagccccagaattaactgttgcgtcagtccggtttgaccacacatacgcatccaaaacaccgtcagttgatagcagcgccgccagcattgcggcgtcagtgtttctgccgtttcgtgataccgattgcttccttcgcgtctcgaaagccactctcgattcaacatcaacaccgacgacaccggcggcatcatttcttactgcgtcccaaccggaaagaccggtggaataaatctggtttagttcccccaccccgcaggggatcggcccagtggtctgattctggaattggatgtcaacatgaccgctggaacctatggatgccccattaattgactgatagatatatccagactcatccatcgccgtgctacccgcagggatatgccgccccacgccaccggtgcatgtcgcagtaacaattgttccctgcgcagcgatccgctccatgaagtaaatgctgccaatgccatcctgaaatctgccagtcgcgtaatctgggttaatctgattgaacaggcacagtaatgcatcataatttgtggcgataatttctgtatctgactgagatatttggccctgtggtgaagatagcggttggctagttccgccccccatagcggcatcaaggtccgttaatctgcctgacaggacatcagcaatatcaggaaccagcaagcctgtctctgtgatagttacaccgggaaccgctgtttttaacgttgtcatagaattacctgtgattggtttccatctctatcagtcaccagtatggccccgcgcgttttacgtgtgtttttgtcgaaaaacacgttagcgatcgcttggctcacaatgggtaatttcttggcttcactttccatctttttggcgatatagccagcggaggggcgcgaacccaagacctcttctttccacggaatacccaaagtattgtcgtaataacactcaccagagaacaccaggcaggctgatgcgacatcttgagcgacggcataaccactatcagcaatggcaatgttcccattaccatctaacgttaagtcccatgtatcaggatcaagcattaaggttctgtatgtcatacctgattgtccgtagtgttggatgtgatagtggatgagccgccctgaacgttaacaacatcatgatcgtgggcgttgtatttatcacgtaactctttgagggaagcagattgagttcctgcattgtcagttatgttaccgcctgccgttatgtttccagtgacatgcatcagtggcgttgtcatttcaaccccatcaggagcagttatattcgcctttgagcaggttatgtttaccggattaggggatgtgatatttaactcactatcagcgaactcaataaactgcgttggatggccgttaaggaacccgcctaggtaaagcgcatcggatttgctgtgggttcgattacttcccggaacagactgggataaattggctcgggcaactgaattgtctctatcgcatacagcgatcatcccaatatcccctataacggggttcatgataatagctgagctgccacgctgtaggcgaaatactgggatattgtagattgtgctattgggtatcattgatcctgaacggtcagttcttgagactaacgggagaacatcaacaactaaattcggggctgtccctctcacccccttaaccttaacaatctcaataaaaaacagtccggtcattaatctttcaaaagcgtaactaaaagactctgcattacttgcttgcgcattcgttggggtaaataaattttcatgcatttttattttgtgcctccgcccttgcttcattggttctatatgcagtgcagactgaatgccacgcccctcccgaaacccaagacgatagttcatgccttacggttgaaagttggtatttaccgctggcatttgggagctctgtctccatttcgataaagcggccaataaccaatagagacgagtattgagtttgaaacataatcccgcctgatgaaaatatcggataaccaataagaccatattcctttgatattaatggaattatttcatctcgagtatttttttcaggccaaaactcaaccttttgaggtggagtcgccgacatggcaacgccataatcgacgcatatctgatgtaactgatcgaatacgctaccttcgaaataagggcttcccgatgtcgtcatgccattcattttattgaaagaggcgcgatatcccgccgcgctgcaaattgaattaataacgtcagttaatttttgagcgccatttacagagaatgggcttgctggcatgttttgcagatcagcatttgcggtagcagatatcatcaaattactatctggtgctgcattcatatttgcaactgatgaggtcattcctccagaaaacacgaccgaatcatcagcgaatatctccacgtttattctctgcgtgtctaacatattcccgtcagcgcgcccagataacgctgcaagcatatccagcccaagtccgtatattgatatatccgctgacgtccctgtccttcccactaccgcattcaatgaaacgacagcttttacattatttatggatatcttgttgtttccggatgaatcgaatgagctagtaagattggtaaagtcgaagcggagagagtgttgtttatacaatatcagcttcctccaagtagaatagttggaaccggctccccaacccctcccattgcggatcattctgtcctaccgaatccaagaacagcaggtcacctttaaacccaagatatgaataccgcaccatacggttaccgaaataacagggtacgccctgcatgatagggttgccgtccaccgtcaaatccatataaatggcactggtgcgttgtatcaggcgaatattgcattgctgtccgccaagttgcacactgaattcctgagatttcataggttcgatagatactgtcatcatggtttcgtcgcctctgcaatttccttggttaactcagccgctttctgtgttgcgctactaacaacttcaagcactggtttattcacagtatccagagcactttgaaatcctgtggtaatcgtttggtctacatttgaaacaatttccgatacggaagattttaggccgctccacgccttacttagctcatttaccgttgattgtttggctccggcaggattcaaggtggaagccccaacgccagaattacttagacttttttgatcatttgttagttttgtatttgattgcgaaccagacagagaaacctccatctgctgcatcacttcttgaaaatccagataaaccacaagcagcgtcacaccttgctgatgagtaacctcataggaatgaccgacaagatcataactctctaacgtctcttttggcgtctcaatgtcatatatccccgtcgttgctaacatgtccttgatggttttcaaggtgtcagactgactagtaaaagtaaggtcgaaaatgttggggatcgtaccggtgaaaccagtcattccggagataatgattgagcacctaaccctagaagggtctttaaccttattgatggactggtatttaccactttcaacgggagcattagttatttgggctctccctatcggctgaatagatgccattccgctaaactcaagagcaatagaagccttcccgtggtttcttattgaataggacgggtgaagcacgctgtctataattgataatggcgatccgccaccaatagcgttaaatatgtcgctggtgttgatgtctataatgctcatgggttaccaccaataaaaaacccagcgcaatggctgggtcgtggatattagaaagcaaaaacccgccggggcgggttagtttttatctacaaaatcttgagctactctagaaagataactcattatttgagtgtctctacctttctcatgagcattcggatgcattattgcaatgagcgaatatctattttcatacaactcaccctgaacatacactaaacatgcatcattggccgggtcacccttacgacatgctctatcagcttgtggtttattggatgggaactttttaggtggaaaacataaatgaatatgcattaatccagccttatatgctccgtgaggctgagtataagccacgtctcggccaaaatattcgggcactttagacgtggttttataaaccgcgaaatctcttaataaagccgactcaagtccagggaatcttccgaaaacatcatcaaagtattcattcttcgtttgagggtttatagatacttcaatgggctgcatccatttaccaccttagtgaaaacttttagaaccgagtttttcggtggtgtaatcagctaaatatctaagaccttgtaaatcaatatcactttcaaatgtaacagcatcttgtgttagttgcttaacgtagctatttaccttggttacaatagagcgggcttttgcaacttttctccaataagcattcatctcagaggagacaaatgatggcaaactactatcatcagctacttttttaagcgttatttcaaatgctctcatgaacatttcacaagcttcgaactcactaagatcttggcactttaaagcactgcgcgctttatctgttgaatcattagataactcaagcaactttaaataaaaagcattagcctgttcagttaaagactcaacaactgctttaccagcagccaattcactagcaaatttagccattaaatctagcggaacttcaatttctcctgttcgaccaacggtcggaactggagaaattgcgaacatctgcgcagacgcagcaggctgaggcatcgctgcgctcaacattgcaaatttagcgaccgagaagaaattcatatactacctctatcaaattaaactactcatgacctgtaatggtcgtttagaagtgtaattgaccgaggcgtcaacacacaaccgcagttgtttatcaaatagataaaccattggttaatcgagtgatttattttctacgcagttcacgaatttagctcgaacttacgcgatcttgcttgaaacaactggatggctgcacagttattgagccagatgatctttctgctaactactacaatctaccgcacggacgcgccagaatgcaaaaagcccacctgagtgggctatgttgcgtgttattgcgtcagctaatgggtagaattaggaaaacagcacaagggaattattatgaaaacccgattaataaccttatctttactggtgttcattttctcaggaaatgcttcagaaaataaggaagacataaaatcattagttgatgaaatgagacagtacataaccaaaggggcttcaagtccttttgatgcctgcaaaagcatagcgtcaagcatggttagcaagtatggaccacgattaagcgaattagggaaaactccatctgaagtaagagattcctcgctagcaatttgtcttgatgcgctttctcaagtagaaaccgcacaatcacaaggcgaaatatccatgtggaaaaccgcagccttgaaaaacattgatatgcagttcaaaaatgatagcagagggccagtaccaaaagagtacttgattgatagtattgacaagtcatctaagcttgctactcttttgttcctatcaatgcatgctgacgatcgccaataagcacttactttacagcgcttgaaaatgcctgatttgttgaggatcgactattcatctccttgaatccttctgccagttttgaagcctgttctgtagtcgcagttacttttacctcgccaatattttgactattgtagttgttgacaacgttttggcttggtgtgtttgctcttcccaccccattagcaagttgttgctgagtctgatagtaaccagcgtactgacttttggctgcgtttccataatctagcccattcttccaatttgaatacccttcgtgtttcgccatgtaggcactcaaactagccataacagaaggatcagaaagatctagcttatcgttagcaccgacccccatagctttcgatacctgagctatgtaggctgcagtgttgtttttgtgatcacccggtttttttggtggaggcgcccatttagtaataatcccactaatagtatctaatttatccctagtgtaataagtggatagctgatttctagccgccttccagcctgaatcttcatcagtatatttagcgaatccaccagaatccattccagcattgccttttgtcatgatatttagagggttaaggtttcgatctggcctatttttacctgatttattggttggagtgtctttatttgggtcatcgtaatcaataccgagaaatctctctagaaaatgctgctgaaagacaaatggcctctgctcatcagggacatctttatattgatcttgaaccatctgtccaagcaaggccaccgcagcaaccccaccaacacttttaccactaagtagggccatcgcagcaagaataccaagcgcattacctgcaccacctactgcttttataaacccatcaataccattaccaagccctttgaaaaacccaataatatcgcccttgttatctttcaaccactcaaggaactcctgttcagctttaagaacctctggcccaaatgttgccatcagatcttgctttacttgtgcaaattgcgagtccagagctttagtagtggcgaggatgttgcgctgggcttcttcctgttctttggtcattttccagcgtttttcctcctcagacaccatctgcacggctttgccgttcttgatgtctcccgcaaggttggggtcgtaaccaaatgcagccagagtctgcattaactgcttctcgctatgaccttttccatatttctgaaactctgccagagcgtcttcagatttaccgcccaacttatggatatcaacgccagttcttgcgccagtggtaagcaggttctgtgcttctggagtcagtccaccaaagatggttgggtcttccagattggcgagtgccatttttgcgctcatctgagaaccgagaaaagcgccaccattctgacctatgcgagaaaagccatattgagtgccaagaacattactggcactcgttcctagcattctccccatgttactggcccggacgatggattcagcggtactttcaaaagcgcgatggatgccgatggcaaccgcagtcattaccccaccaacagctagaaatcgcgttgaaagcccaagcagtccactaaaagccatgcttagccctttcacggctgctgatgctttatccgtttctttcgtcgttttggacattgaggaggtggttgatttctcaattgcggccgttaacccctcgatggcttccttaaggtctttagcccccctttcgaccttttttttacccgagagaaactcctcggttcttactgtgactttgtatgctagctcttcgagaatcaccgtagtttctccgcgtattgctgccaagctcttttgttatgacactccaccgcgataagctccagcagattaaacgcatcgcgcacagacaacttctcctgcaaatcaaggtaggtggccctgcctgagcagataatagaactcatctgtgcggatatgttgaccgaggataccaatttagatggcccctgatctggctgaatgaatggatactttacgcggctgcgatggttaaaaaatcgaagttcactccgaacaccttgtccatcagagttcgaatagttgagacctcttcaaaatcaatggacttaacctcgcgagtttgtttatttccatcgtgcgtaataacaatttgcacggtggacatcagacgatctcggagattacgtgaaacttcaggtgacgcggcacacaggacattaattccaaccgtagccagtccagcgcatcccatagcaataacatcagcaggaatgccagaaaagttagattctcccatcgaccggaaaatatcctgagctaactcgtcggcatcccacgctgacatttcagtgataaggaattccttccccttatcccgaccctcatcttcaacgatatatgtaatttgttttctggacattatgcggcgctcggtgtgcaggattcaaagtggaaaatggctgggcgtggttgcaatacccgcttacctggaggcgtaggtgtccacgtatagagcactccattcacaaagttgtacttgatgttaagcgctggaatggtcagcactgcgttgcaggcaaactttgctacagcggtgcgctcggctgcataccaatctcctatcagttgggcagcgttagacgttgccattagggtaatggtcagctccgttgggttgaagataaagccagcgtggtatttaccatctgctgacatcatatcctcagcgttctgcaatgcgccggtatcaaacatgtcttcggccgcgtaatcatcaacatcgaacccaccagggtaaaacgatggcacgatgatacgcaacttcgagttggcacttgtaatatcgataggcattttcagtccttacaggatatttgttgaggtcatgtcgatgctttgaatcaactgcccgtcgacgtaatagaagattgcaccgtcaaggctgcgctcggttcgtgatgcacctgtttgctgaggtatgaagaagaaccagccctgcgtatacagcacattggaaatatcggttccgaccgcgtcattgacgatgttgatttgcgcctgatccaacgtaacgccagcacgaatagcaccaaagttaatcgcattggtagccacatcaatcacagcagcagatatggaagcgtaaccgccggcattaaacgcatacgatgagttgttggtgaacaggttagcaaatgccgctactaggtttgcattaatccatacctggctaatgaagctatccagccagaggaacttgccggtaattgcgccatttgagacgtaattagccatggtcttgttctgcccatatgcgccgtaaaaattgtaaccgttcgactcaagcgccgctgccgtggcgttgtcagttacgtttggcgcgatacctgcgaatgcccgaaacttgtaagagactcggccattggttcggttaaaattaagcgatgcagaataagccagcgccagcaccgagtagagatacgaaccatacacagggaatacgttctcatatccattcgcaatgactacgctttgaacgaagcacgattcattattggcaaccgttgcatcttctgatgtgtcatacatcgagtaggcgtagcggttatttgacgcacttacccacgcgcacaactcttctttttgttcatcagtgagatcaaccacgctggcggtcatcacccagtcctgattctgatttacaatcgcccccattgtgtcggtgatgcttgttgctgccgcaccgggtgaagttgttgcggctgtatctgcggtcaatttcagtgcggttgcggcagcaccaggaacggcctgtgagacttcgctgttagcgccagtggtagctgaccggataatgaaccggctttgcactggcaaccagtcaacttcgacgccactaccaaacgcagtggcaattgctgctgctgcgtcagtgaagcttgttacggctgatagattaagagaagtactggttttcgatgctccatcgagcattaaagtaatcgtcccagtaactccctgtagtgcagcgattttaacgcctttaaagctaccagagagcagccagccagctacaggttcttgcaccaaccgcccaaacaaaacagcacccggtcgaacagtggcgttgtcatacccggacatatatagcgatgcagccaggtattctttgctggttgtgccaaaggctgcgccaacatctgccgcgctggtaaactcggaaactttaccaaccggcagtaactcgttatcggaaagtagtagtccgtaaacatccagcgcggttccggctgcgtttacagtggaaggcgtgatcttaaagtcacgcgataatggaattttgctcattgagtcgccttatcagcttgttcgatagaaaagttaaccgcgtcgaaatagtcctgcttgacgtcgattgtgatgtgaacctgaagtgaaacggtcagcatgtagcgctcttgccactgattttcagcattgatcatcggtgcctgaattgcttcggtgctgtatagtggggcgacccgactgtctatggccttgattgcgtcataggcatagccagtgcggaatagcgtctccaaagcgatagcccgatccccggcattgctaccgtagatatcaacctgaatttcggcctgcctaacctcagtaaagccaatggcacttgttgttggcgaaccagtatctttcttgatttctcggctggttgaatgacgcttaaatcgcaatggcgtcagaatgcaaaactgccccttatccatcggaaccctgttagcctgtgcttgttcacacttaccgatgaattgctctgcgaagtcggccagcacatcaatcacgttatcaatggtcatgtcattcatggcgtcacctgcaactgaacaagtaacctgcaccaatcaggccacagctccaatggctcaataaccagccattcttcactaccaataataaacagatcgccaccgagcactttttcacggttcaccccgtaaaaatttccatcaacatgaatcgatttgagcagtccggatatatttagcccgtccacatgcttcaagtcgccgggcgataggggctgcaactgaatggtgactggtgcttcaggtaggtacttgggaacctgcttccggccctcacccatagtgaaaccatcagaccgacgaacaagtgcagaaatgaatgggtttacgcggttaatggcaggtttaactatccgatgaaggttcaatttctcccacctcgtaattgacatctccgatcatttctttagtgtcaaccaaaggcttatcagattggttagggagcacctttctcgttttacgaatgtgaagagttacatcagaaagttttggctccatgagggtagctatcgattcctgtatgtctccttttatttgagcgcccacgacctcaagaacttgcgtggtatcaattcccgcgcgaatccccctggataccgtttcggcccaatcaccagacttttcacttatcgcgttacggaaaaatggacgaggtggctgattattgccggggtttccgtactcgttgattgccgcaaccattgccacgctcgttccgtctggataggttgccccatcaataaatccagccttcacctgtttggatgaaagctgcttttcaatgttgttcaggaaatcagatatcttcccggccataatcaactccccggatagtagttagccatgcggtataccttcgttgcctgccagtaatccattccatacgggctttgcgtgtaccacatgtaacggaattcaaccacgccagcctccgaagagaccgagacagaaccctccgaagccgacgacaaccgccctaccatgccggagccaccgttacccttgtcatccccgaatctcatgtatgccaaatgagccataagcaggtagagcaagcgctctcgcttaacggcatcatctacaagtgagaattcagagttgttaaggtaatcggtggcctgttcaaacaggtaagggagttgttcgtcggttacattggagaactcagggaacatggcgcggaatttcgtgatatctagcaccacgattgccatggattactcctctttatcttccgtcacacccgcggtttctttggaggcctgttcaaagccagttttaactttggcgttctcccgacttgcgtctttagctgacttctcatccgacaccgcgaaaataatgccgttacggatgaatttagaatcctggtgaaccttagcgaactcatcccatgcttccgcaggaacatcattggtaataccaaaaccattgaccagcgctgatgagttagcgccagccagggtaatgaccttatccccatgacggaacgaaatgccgctaggcagtttgcaaccaattacgtacatgtttgatttagaagccatcagttacacccccaacatttgagcgaatagcgtaggctgggtaattaccgcgccatacgttgtgcccgagtgtttctgcttccagcttgatgtcatagtaatcactgggtgggcgcggagtttctcgctataagcacaatatccagcatcctgaccttgggcagtttcaacgaacatttgtaccagatcgcctgcatctgtatcgtactgcggagcaatctcaatgcgcagattagtgaaggtgtctttaaccatcttctctactgtgttaccaaagatctcgttagcacgcttgaaccacacggaagcgttaggactcatagccagaaccagtggtgacgccatgtcaacgccatcacccactacacccttggtgcgagcgatcaggtcagcataaagcgccaagatatcgttatagatatcgatgacttgtttatctttccacagaaccttgccatcgacggttgctggggtgattggtgctggcaagtctgggtcattcaagatgccgtagttcagtaggccagaaacaccataaaagtagaacttattttgcgcttgattcagtgtccaagccgcagcacgctgtttctcagctacgtacggcagcatagccagaccataacgctcctgctccaactcaccatagatcaccatcgtttgatagcgatacacctgacggttttcccattgggaagtaacctggttgccgccctgctcactgtaatcatcataggccacgacatcacccgattgctcgatgcgctgaatcatcaatgtatcttgcgcccaagaacctttcttcttctcacctagaatgtctgcggccttttgcttagcaaagatagtgcggacgatctccggatcgatgaacgtagaaacaatggcaggaatgccgccgttagctggcagcgatggctgaacatcagcatccatggcaaacttggtcactgaggatggcaagtaaatgccgcgcgattcagcttccgctttaaaggcagcgaaatcagcctgagtcagttgaggcattatgctttgctccatgtagagataataagtaagtcaccgacggcggcagggcttgccacataccagtcagtttcaaccgcaccggaaaccgtcgctccagcgtcatctgttttcagtgtaccgtcagcaagaacagcaaaaactttctgtcccacggtggcaaccgtcgcagcgatcgcccagaaatcccctcccacaataggtgatgcttcacgacctgccgagatggtcatgctattactttgcaggtagccgatggtggcattggcgttgttatagatgaagccaacaggtttgccggtgccggagttatccagtcgcagagggttagtagagttacgccatgcgaaacgagccatgactaatccatcagttcccgcctgaaatgctcccggaccgcccgccgccgcgatgattggagtagttgacgcaggctgtccggcctgtccaacgccggaataaatatttacgctcttttgaaatgacatattatttcccctcgaagaagtttttcacgttagcgcgagagtcgtggctaattggcgctgcgtcgtttgccattgctgggcgagagtaggctttgaagacagattggagtgctgctgaaggcaatgttgcatgatctgcacatcccatctgcttcagcgcggtccggtaaacttcatcggcactatcgcatgctaagtcgccaaccacggggcgaacatcacgttctgcctgacgaagcgcggctgcgcgggcttcaacggctttaatcgctgaatccatagctaatttactgtcatttgccatcttctctttatcggctctatcagcctcatctttggctaacttgtctttctcagcctgctccgcttcgtctttggctaacttttctttttcttcgtcggtcatctcgtccttcgctgttttggggtctttctcgtcgtctttgatgagcttttccacgtcctcttccgctttctttacagcttcagggtcggcatcgttagccatcagcggcttgaagatgctcatgagttgtttgatttttgacatcagtttgagtcctgtaggtagtgagtcatatacaaatacatccgggccagcccggccacttggcacgattgccacatggttacaaacgatgtcacgcataacgccatcgtatggttcgccctcgtactcgcccggcgtcatgtcgagccgataacggtatgaagatgagatttctcgctgctgtttgttctctacgccgataatggaattgatgtcgtaaatgcccatcgaattcttcagatacggagcttcgtacactgcgtcagtgccagtcgaaccaataatgtgttcttttggcgggtcaattaccgacacagcgatgtgagtgtctagaactggtttgttgttgaatgttggagcggctttcctgagttcttcagggtcacgtagcaaccggtatgccttgtcagggttaaggcctaacgcttcccaatcgggtatctctttgccgtagtagacgcagacgttagccttgctgataggcgtcagttcaacatgaagcatcccgtcaacgtcatagcgacgaacgctcgccttatcgaaggcaaacttcacatctttcatgttctttcctgtttttcgggcaataaaaaaggccgcctaagcgaccttgttcgttttatattttcagaatggcaatactggcttccatacacacccgcaattaggctcttcacccggcaacacatgctgccctttgtcaccgattggcaggcccttatctaggtcgaactccttcccgttagcatgaacgtgcttcttgcggggttcgctaccgccgccactgtgtaaccagatgcctcgcttaatccctgccgcttgttgccttgcgttggatagtgcgctggtagccttgcgtacctggtcacgtgcaatgaattcagcacgcctgcgagtaataccatgacgcttgccaaagttagcttccatttcgtcagccaatcctttgcggtcgccacccttggctactgagcgaaacaccatcgattccacttcagtgaaatacttctcaggaatggagcggattaacgccacattctctgaaatgatagcctctcgcttttcgagcatagcctcagtccactgcatgttaattgtcattgagtctttacgggcagcagcaagtaatgagcggtcaacagcctcgccagtcttgtttgtcactgattcggcagtaggtagcgccatcttaatgaagcgctctacccacttcctagacagagcacgcaaagcactacgcaacaattgaaccgggttagcgtccatcgccagtgggttatcttcaaatatcgggacgatttgtttcttaacatcgtcattcatttctctgataacagccagtaactctctgcgataccaaatgatattaccggcgttatagttgaccgcccgaaggcttctactcttcttcggtttccggttcatagtcacccttcaggttttcgaatcctgcaccttcaatgcttttcagtgcgtctcgcgcctcttcagagttaatcagcatgctatcagcagcagcaaccacggtttcaacgcgagtcttgttggtgttggcacggtcatcatcgctgacctcatcaagcggtttaaactcgaagtagatgtcgggcttcagttcgccaaactctgaaagctggataatcttgaagatgttctcaatggctctgcgatagtccagttcttgcgagccggatatcgtttcgtgccacgtctcaatctcagcatccccactggcattcaaacctgctggggcgttaccaaacatcttcaggttggtggtgcgtgatggtatgcagagttgctcttggtaattcgataggatgcttgacagctcactcagtgatgtctgcatatgaatcagatcctcttcagtatcgagagcccatataccaaagttatcctgatacttggtgaacattttaatgcgcttatcaaattcaccagggatttctaacctagcatccatatccgtcttcagcgcccgcattcgaagagttcgaagaatctttatcacgttcttcttcgcatctcgccagtcaacaacgtaatcctccattaactgcgtcagcgaaagaccgccgaagttatatgatggttttagaatgtcgggcactgggcggctaacgatatcgatgaatcgagactcatgcaccgtatcccccatcacgaaccatgcttggggtttgtagaaatctggcctaagcggtttgtttgagttgtacatcgccggataaacccaattagggtctacgcaacgaaagcctttaagtgagcctttagttatcttgcgcgggtctagaaataggggtttttcgttctcaaggtcatcggcgccaacatcaataaagatgtgtgccacgccatactctgagtcctgccttacggcttcgtgaatcaagcgcttaatgtcgtatttggtcagcgccttatccattaggtcgatatcaggatcaccctctttggtgctcttcacctcaatccagtttcgcgtcatctcgtcagccatgatggtatgcatgttcgcatactcaacctgctgagacattgccgccaaaatagggtagccacgaaagccagaatattcaccaccaataaacatgccgttgatgacatcgtaaggcgtggagtccatcgctagagcggattcttctttatcttctggaatcacacctggtagcggttcgtaacgcttaaactcagcaaatggcttctcgccattcgcagcagacgccgcatcaagatgcgcatttgtaatcttcgccagttcccgccgaggtgcttgcacggcttgagctgttcgcacagccttctttcttgtcattgcagtatctcgtcaggaatgttgaatggtttgtgcgccggagcaaatgccatgattagcgagtccgccatatttggtgacggtatgccacgcttcttcatgtctttcttgctctcaaccttcacgcgaccgttattgtcgtagtcaacccatgggcgtgacagctcagccttgaggtattccagttgtttaatgccggagctaaggctgattagctgatcgtctgaaaattgtttgatgaattctttgtcgttggggttggcttcgaggtgcttaaccactcgccatgtattgaagaagcgatcacggactccccaccatgcctgagccttgatattggagaacatgtctttattggtcttgccttcagcatatttagcatctggtttgaatacggcagcacctgcgttaaatccgctggacggtatcgcacagacgcgcctcaggtgagcttttacgcctgcacccacgccaatggagtcgtaaacaatctcgcttgctgtgacgctttctgcgtagtttttgacgcgatcagatgatgtgattacatcacccttgttccactgctggcagtccatgacaacagagccgtgggccagtgttgtagcgttgctatcctcgccttcatctgctacgtcaaaaccgactcgcttacgaccagaaggggcgaagccaatcagtttatgggcatctatagcggcagcaatccacgatggcttgataattgccaagtcactgtcggcaaccggctcaccttcccaaatgtgcaggtaaaggtcgtaatcacgttctttgcattcagccatttgcgcagggagcggtgagtcatggaagtgagggttgtcgttgtaattggctttcagaacaatcgccccagcaggaggcctgacgatgaagcgctgatacgtatcgtcaagaatgttcttcgggttaaagctcacccatatctctgagtgtttgtcgcctcgtatggatggaatcagtacatcccatgagtcttttgttaccgcctcggcctcttctacccagcagattccaacgccctgtatggattttatttttgtgacgttgtttttaatgccggagaatacgaagctagcaccggttgctaggtgaatgattgtgtttttctggatttcgaattctgtggaataaccgagacgatcgatagtctcacatagcaatttgtggactgagtcgctaatagaaccctgaaactcgcgagtacacaaaattaccgtgttaatgcgtcgtgcaacctccacggcaagttccgcaaagaaatatgacttcccacttccacggccgccgtaagctattttgtatggagcgctttcggcgaatggcttgaaatgtggattagccatcgaagatgtccttaatagatttgtgctcgaccttaactccgccactcagctcgacaatcactttgtccaggccggtcaacttggccttgcccattgttgcggctacggctgctgatgattgtggcgtctcagccgctaaagctgatttccgagcctcttccaattctctaatcaaagagtcaacagtgacgtgatggcgctgcttaatctcaccctgcaattcggcaatccttgccgtgatcttgccgttgtctaatgactctttagctttccggttaatggtctcaggtttcatcttgtcagcagcatacgccgtccgatatgcctcagaagcattacccgtttcgatgtatgcctgacagaatgtctcttgcttctgtgtcaggcttgccatggttatttctcgtctgaatactgcgtgataaaggtttctctaataagttcggctctaaacttagcccccctgatggatccgggtagaatttgagtaatgtctacccctgatgcccccaaatctcttaacgcatcaagttcttcatcaagcttcccaagcagccaatcgctggccttatcttgaattatttctggaacgacgcgagcaaactcagttttatcggtcaccatcatttccttacttcaaatttgaatccgtggcctgcaataaagcgagatagcagccttgctacggcttgacggagttgacccgtctcgttgttcaacgatcgttttaaacgatcaatagccgattattgatctgtacaaccaatttccatccctctgatttgactgtcattcttttgcaaaacaaaaaggatgatgactatgtgggctaaatttaaaagttggtacatggctgcaacagtgagctactccaccctggcattggggctaacctttacagggatggcctctttggtcgggatcgcctatctgatatatgagtgcttttagttaatggagagccgttgtgaaagtggctctcagtttttcttttagctggcaatatcgagcgttaacttcagttgctcctgccagaattccacggttgcttctagggcaggtttgtcccagcgccaacgtgccatttctcgtgcaccaccacttgcttttgatttccggtcatcgcgaattcggcaggcctggtcatagttttgctgctccgttagctcaccacgcaacaagctatctatatgcaaatcacaccagacagcgaaccgagcatcgcaccaacgcgcaaaagcgaccgatagctttggatgaagccatgtaccacctccgcgatcctttctcgccttactggtttttacatacctgcatttcgagggatgtagaatttcagactccacaccagtcattgcctcatccagcgcccggatgtattcaagcgtttcagctagcctcatccagttgtcgatgcgcttaccaaatttctcagcaacgtcagtgacgtttacccaaccttcagtgttaaagcgtactgattcgcctttatagctaagagggataatgttcattcggatataccttttagtgatgaaccttgttcgcacaggaatacggccctcagaaggctccgacagccagccggttcctcaagggtcatcctgaaaggttctgagtgatttgcgctgcgatgcgctggatttactgcataaaaaaagcccgacctaagtcgagccttttgtgtttttttgcctaacaagcctacgaaacggccatttcaatcaaatctgtgaagtccaagcacatgtctagcctgtgtccgtgatcatccacgaagttatatttcttaaagtgttcgatcatctctttggcacttttgccacttaaaggagatttatcaattgattcgtcaacctgtttcatcttcaaaccttcattcagttggttacgatagtgcaagttccactttggaaattgcttttctaggaggcggtatttatcaatattcgagagtcccggcctccattcacacgtcattaatgaacgcaccgtctaaggggcagtattttgatgcgcatatcaaaaaagctggctacccttaccgcaaagttgggtgattaattcagcggggatgctgtccccaccttctcttacctcgcaagacaaacgttattgatatacgcctgcaagccgtttatttggctggttgcaattccgattcgctcgcggagactgagataatcccgttcagcggcgttagtaagtctggcgctggcatcatcaacgctgctggaggtggctgtggcttcgggcaatcgcttacagctggcgttgagctgcaaccgcttagcaccagtagcgatatcagcacgaaggcgctcgttctcagatttggcatctgccagttccttggtgtatttgatatcgatagcagcaacctgctggcgctgaattagcatcgtgtcaatggctgactgtctgctgttggctatctgggtaatgtcagagacgtcgcgctgtagcctggttacttgcccgtggtaatacatcaggccgaatagcagagccaccgttacagcgatgagtattgccgttacgcgactcatgacaggaaaagctcacgctcagccgcccggcgattagtcaggcctttcatttctttcccacctgctttattccatttcaggaattcatccgcagcgccctttgcatcacccgcgtttacctttttcatcagcgtcgatgtgctgagcgctcgggttccgatgttgtaggccagcgataccaaggcgtcgaattgattctgggttacgccgattttgagcatctggttaacgccctgctcgaactggacaactccgcatttcagcaaccggtcggcggtaggctgatcgatagtcatgccgcgaaccacgggcttaccatctactggatgagtccagccgtaaccaattgtccagggagcgccgccggtgccagggtctggatatgccgtcaatttgcagccttcgaattgttttattagattgattccggtgctactgatttgcattgtcagcccctgtcttattgccaacgatgcgctttagcaccgaaccaatgtaatccgtacccatgtacccaatgaacacgctggcaattaatgaccagtcagggttcagcccggctataaccaatacatctttgataaaccatgccatcactgagcacatggccgcatcaagcatacgttgcgttttacctcctccggcataccagccacgcaagtaagccatcaacgcagccagtgccgcgctaagtaactcaccccggtggtctgctatccaggcaatgatgagcatccatacatccggtgatttcaacattttcatgacccaccccccgtttggggaaaatcttccccggcatttggtcgggtgctgttgtgtagggaatagctcccgtcgtagtcattcgaaagtgtgagcgtgttttcagtgattgactgttttgacgggagctaaataaaaaaggcacaccgaagtgagccttaaaattggtatgtggtggcggggaattcgccgacatcgtttcactggtgttccacttgtatccccacacatcggtgcctgcattcaccacattcggctggatactgtttcacaacgattggattaaccaatccagtacccatgcgaatgtagaatgcaaaaagccccggcgattaaccgaggcttctaatttttgtggtggtgagtcagctcaagacggcattcacaagcgccgtttacttactacccctctaccaccaccgctcttcgcctttgacgtccgagcttaactgaaatatacactttcaaaacttaaaagcaatacattacgtaaatattttctatttatgcggcgattagtaggttttctttctccacttccgacctcaacaagtgaaataatgttgcgttgaatatctcacggcaccacctgatccgatcaatgcattgctttagcgtcaggtgcggggcgtgaacgcgatttaggtaacatgcgatttcttgcatgtctttgcgctcacaatagtattgaatagctacagcacgaatcggattgctttgagtaaatgctttgaggactacctgatcgacaaatgcagcttcttctccctcgttggcgcgcgcgaaaagattgctgaatgagtttctcgggttaattatctctttggccttctggaataattcggttccccggtagcccaatttgtggaggtcctccacagtcttcacaattgaggctcctttattttcatcccacgcactgacaatcattagtcggccaataacaccacaactccctgtcggcgcggtgtcaccaccgacagcctgcccccacatatttaggactgaccttacccaccgatcctgcactggagtgatgcgctgtaatttacccargtaacttctgcgtggagcttttgcaagctcgtgccatacattggatttcatgctgcctcctggagaagttttagctttttcagttccagccggtagtaatctcgaatgcttttcagctcttcaatgctgtaactgctgcgttcgtggttgttttcgatagcctccactgtctcaattccaatgcgcttaatcagctcgacgcggtacggaacgatattcccgctcttgtgctgattgcatactgaacattgtttatggatttgccgggggtcgaatctgaattgaggtgctgctgcggttgttctgtagtgccctgcgtcccactgtgctgctgaagtggtgccacatgatacgcagggtaggtttgaatctcgtgctcttacaaaggcgttgacggcttgctgcgcctgcttaatccaatacgttttggggtgggcattaattcttctgacttttagctgcttccgatcctccttttgccgctcctgcctttgcttaatctcgttatcgtagttctgctttcgcctctctttcataaccagaaccgcgtattctattttgtgctcttcgcagcaccaccactcgtatatcgcggccggtttaaatctcgttttacacactttacaatttcgactcttcgggagcttggctatcattcccggcctccttcgctgctttatcaacgcatttctgatgggcgtaggtttcacccttgttaagcatcaagaagcaatacacgcatacggattgcggtaactgagtcatgcctgctccccttgaatctggataactgttaactcacgcccaaataccgcaccagtgtcgatatagaattggtttttaaattggctgggtttactcattggcgtatggccgaagataaactgctttgccccagttatttctgcacctaaaccatccatagcgtcacccacgcgatcccgattccaaataacaagctcctcactaaccggctttccgtaataatattcattgccagggtagtcggcgtgggccactacatatttaccgctgtcagttgtcacttcgatcaccagcggcagcgcagcggcctgattaattaagctggttgccaatagtttttggtcggggtcgagacagaaaaaccacattccgccgttagctacccagcattcagccattccatattttccatccagtgcatcaatcgccatttgctcatgattgccacgaaccgcacgaaaccaaggctgcgttatcaggtcgaggcattcgacgttctgtgaacctcggtcaatcaggtcgcctacggatatcagcaagtctttgctctcatcgaaatctactgagagtaatttctcatcgagcttattcaggcagccgtggatatcaccaacgacaaatattcgtcggtaatcggccccgttaatcttttggtaaatatcaggcattctttctactcctgagtcttagccagcgtttagctaataacggatagatagcgtcatatgtgggtatttcgctggcggggattgggggtttaggtttggttcgggatgtcttgcggaagataagattgtctagggcgaaaactatgctgctttgcctttgtcgcatggtgtatttccccaccggttagcccactcgatttccagcttggatgcatcgctgaatatcacgccctgctcagtgccgaaccagtagatagcctcgataacctccaccatctcactcactcgcatcttgctagtacgctggccgaacatcaccaccccgccgccgattccaggagccgtacgctgatcctgatttttggccttagccaccatcgcagtaatcaggtctttccagtcagcttcatcgtacttctcaccgaaccagagaacctgttttgataggtcgtgcaaaagtggccacattttccgattctggtcattgctgcgtttcttctcctgaatgagaacctcaatcggctttttctcatcaagcggcacactgcggatcgctgctatggcgttgtcacgtacctgggtatttcggagtagataggtatgctttgtcatagtggcttctccggtgcggcggctagcatattggcatagcgctcttgcatactttcaaagctgcctgttaatcccaatagcgtgagcatggctaaagttgcctctttcggtaatagtttccaaccttccggaattaccggagagttcaactgtggggcgagatagacagggatatcacctgcaccgccctcaggccaaatatcagcatcagaaccggatcgaagataatccaaatggttttgctctaaataaccaacaggctcagccctctttgcagctaacgcgatgcgggctagtgctgcgatttccctgaaattaatcagattagtgactctgtttggtcgataatcgcaaaggctttctagcctctcagatgtaaatctatctaattctttcatggctttacctcaacgttaataaacccgccacagccacactttgggcagcattttcttttggtgccagaagactcatcactcatgacaaccctctctagcttcaagtggtgatatctgcatgctacgcacattacggcttccgttgttttcattcactctctcccttgattcgaatgccagcagttcggagggcgttggcggtggcactcaacccttcgttgtaggcggtatcagtgtcgaagttttcatctcgctggtctggaaactccacctcaatgctttctcgcgacgcttgccacgctgtccgcatatctaacactgacgctttagctaagttggttaactcgccatcgtcgccacactcaaatgcaaggcggtaagtttcgtgggatttcgatttaagccaagcttcaaactcttcccgcgatttagttatgtccatcatgcagccctcttcgattcgtatctggcgcaggtgatagcagtccaggcaatcagttgtgcgcgtttcatgtgaagctccttcagccggtcaagccagataaataccgggccggtgtagccgttgtgagcaaggcgaatatattgctcaatggttaattcatcttcgcgagtcagttccattagaaaccaccttgttttttagttgaccggcgctcagattcagccgcctttgctttagcctgatcctggttgcagtcatagattgcgccatgacgttgctcgacgaataccaccccgccgctgccgtgccggttaagccggagtagtaattcggtgtcctgctgattggcgttttcgtcgtaagcaccttcgcggtatattcccagccagtaatcacagtcttgctcaatctgtcctgtgtcgcgggagtcgcttggttgaggccgcttattgacgcgcctttctaaatcacggtttagctgagtcagcagaacgacaacgcaatcaagttctttggcgaggttctttagccccttggtgatcatcccgtaagccagatcattacggtctgctttttcggctgacatcagtgtgaggtagtcaactaataccatgcctacaacaccacgttcgcgcttgatgcggcggcactcagaaacgatgtgagacagtgaaagtcccggcgtatcgtcgatgtacagattgccacttctcgccagctctaaccctttcgcagacgccaacgcaaaacggttatcgtcgtacccatcaagataaaaattactgctggatactcctgaggcttgggaaatcatgccttcgcnnnnnnnnnnnnnnnnnnnnnnnnnnnnnnnnnnnnnnnnnnnnnnnnnnnnnnnnnnnnnnnnnnnnnnnnnnnnnnnnnnnnnnnnnnnnnnnnnnnnnnnnnnnnnnnnnnnnnnnnnnnnnnnnnnnnnnnnnnnnnnnnnnnnnnnnnnnnnnnnnnnnnnnnnnnnnnnnnnnnnnnnnnnnnnnnnnnnnnnnnnccggtaacaaagctgattgcatggctgttgcaatgcaagccgttcaatggggtatgaacccgtttgttgttgcccagaaaacccacgtcgtcagcggaacgctggggtatgaggcgcaactggtcaacgcggtaatttacgcaatggcacctacaaaagaccggattcattatgaatggtttggcccatgggaaaacgtgatcggcaagttcgcagaaaaagtttcaaagaacggcaataaatacatagcaccagactggactctggcagacgagaaaggcttagggattcgagtgtgggcgacgatgaagggggaggatgaaccgcgcgttcttgagcttcttctgtctcaggctcaggtgagaaactccaccctgtgggcaagcgaccctaagcaacaattggcctatctagccgttaagcgctggtctcgcctctactgccccgaggttattctcggcgtttactccactgatgaattggacggaaaaccaaagcctgagcgagatgtaaccccgcgcaccaatgccgacctgaacaagatgatcaacaccaagaaagcggagccaatcgagggcgaactggwgaykrcwrwmstnwgatgnakcgctcacctgatgccctgcttgctgacttcaccaacgcagccagcaacgcaaagtcagttgcagatctggagaaattcttcaaatacagccagcgtgtcctcgctagccaccccgaccagctggaaaaggcgatcgacatttacagcatcagaaaagctgagatggaagaatccgtggggtaacagatatatggataatccgcatggaaacatcacggtaggcgcggtgacgctaccttatccccgaatacatcatggatggattaccccgaagaaccgcattgaacggaacccatttaaagcgcaattgattgcggagcggttcaactcatgcttgaagctatcagtcgctgctaacggactggtggcttaaatcccttacccctccacttaaccggcagtcagtctgctgaggaatagttgtgtcaaaaattcgagaagccattaacaaggcactccaataccgagccactccatccgagcggcttttaatattgtcggtgatactcgctatctgttgtgcgggtattgcttatctgattattgattcgttttgaggtgatgggaatggataagcatatagaagagctaagcaagccggtggcgtggacagatgcagaagaactgcaagacatggagcggggatattctggttacttgttcaaatcaatcctgatgaccgcaacatcgacccgcacaggcaaataatgctttactcgcaagagtacgttgattcactgctagccaagctggaagcggcagagaaagaaataagtgactggcgttctgttgcaggagcagcggcacaagatgatgctgactggcacaagctggcagatactgacaatgagataatttgtaagctagcgaatgctcttattggcgcagatgaacgggccaagagagcagagaagaaactggctgaccttgaatttgctgattacaggatttggcatggcgcggcgtgccataacggcatgaaggttatatcattagagaatgaaaacgctgaattgaagcaacgcgcagaggcagcagaggcgcggctacttgtgcctgatgggtggaatgtactaggcccgacttatccagccccttacacccccgttcttgttgctatgaatggtgttgttcaacacatcacctaccaaatcgaagaaggtgataatggcgactactggcaaccagtgaacaatgaagatgatgatggtgcgccaataaatcaattccagcactggaaaccgctacctacagcaccagtctatccggttgaagggggtgagtagtgaacaagcctacgactattatcgacgtggtactgcgcaagcacatggactacttcatggagtctgaccgcatgttaacggtgtatggggcggagaagaaagcgctgaacgtaatccgtaacatggacaacgttactttgttatctgccattagttccgccgcgcatgagttgtatagccatgtggggaaaggccctttaccgaactaatccattatagccagtgaatatgatgagctattcacagcatccaagccagcggaggaataatgctaatcggctttgtcctacttgtcagttcctgcggccttgacgcctgcgaagcgctgccagtttcagacgatatctaccctacccagacagaatgccagaacgtatccgcgctgattaaagaacgccgcccggcgacagtgctgatatgtggcgaagtacgccgctaacctcttccccattttcacggatatgaagaaacggatttcactaaatctggagtatcccctatgcgaataaccattacggcgccggactccggctgcattgaatttgccacgcgtgcattaaatgcctttatcaaaggccgtggcaatggcgaattcccgcatccaagcggtgcaataagtaattcattttttggcgccgaatgcacagaaaagcccagcgggaattattcaattaagtgctggcgtataccaaccaatattgcggaggcagcataatgcccgacgatatcgataacgcttcagctctcgaacaacacaacatcgacaccgcaatagccaaccgtccaaaaccaacaatgacattcaccgggcgctgccacttttctgagtgccgcagggcaattactcgtgggttgttctgtgatgctgactgccgggatgaccatgagattgacgaacggcggaaaaggaatgcggcatgagtgactaccagcttatctattgcgacccgccgtggcagtacagcaacaaggccagcaacggggcggcaaataatcactatggaacgatgacgttagcagagctgaaacgcttgcctgtctggtcgatgtcagcaccggatgctgtgctagccatgtggtacacgggaaatttcaaccaagaggctcaggaagtcgccgaatcctggggtttccaggcgcgcacgatgaaggggttcacctgggtaaagctaaaccaactggccgaagagcacattaacaaggctctggccgccggtgaggtgcaggatttttacgatttcctcaccctactgaatgaccagtcacggatgaatggcggtaactacacgagagccaacacggaagatgtgttaatcgccgtgcgcgggcgggggctggagcggctgaacgccagtattaagcaagtagtttactcgccgcttggtcatcacagcgaaaagccgtgggaagttcgcaaccggctggaaatgctttatggggatgtgaagcgcatcgagttgttttcaaggaaggagttgcagggatgggatacctggggcaatgagtgcggccagtctattcaactgatcccggggagagctgaggccatatgagcgaactaataatttacctggattgggtgctgctctttatcggcggcatcatcacctactggtggctgttctgctggaaggagtgaatgtgtgactccacaagaaaagcaaaacgccctccagtcagtagcaaagaaatgtaacgacgaaataaataatgccctcgccgcactgccggccaacaccaataaagacctggtgacccgtccaatcatcctacgtcactatgaaaagctaaagccacttggctacaagctggcttggctgctttttgctatcggtgtgctgaatggtcagtttaagtgggagaggtgatggagtttctcaggaggtccatatgcaagaggtcgagaaatttataaagattaaagaatatgccgcgatcttaaggatttcagccggaaccatttacaaaaacccactcaaatttcacatgtttaaggttggtgatcgctggagagccaatctggacagtcttaaaaagtttgaacaacaggccgcaaatgacaacaatgtcatccggctggctgttgtaggcggtaaggagaagaagaaatgccgatctacaaaagaggtaaaatgtactggatcgatgtctcagcgccagacggaacaagaattagacgctcttctggcaccgatgaaaagtcaaaagcgcagagattgcacgacaagataaagcatgagttatgggccgtggcaaacctagataagcggcctgaaaagttatttgaggatctgatggtcctagcattgcgggatgcggaggggcaatccagcttcactaataaacagatatatgctcggtactggcttagtgtttttggtgggcggctaatctcttctatatccggagaggaaataacagataacctaccaacgcataatttgatgacaaggaagcgcctggctaacgcaaccagaaaccggtaccgatcattcattatgcgagggttctcgcttgctgataaaagtgggtggttggaccgggagccatatgttcagtctctgcgtgagccaaaggtgagaattcgctggatagagaagagcgaggcaaagtgccttattgacaacctgcgtcatgactggatgaagcatgtatgttcgtttgcattacttaccggtgcaaggcttggtgagatactttctttgaagtggagagatgttgacttagggcgtagggttgcggttgtcacagcggacaatgccaagtctggaagggcgaggccacttccgcttaacgatgatgctgtagccatcatgaggaaaataccgattgataatgaatttgtattttctgctgatggagccaaagaggggtatatcaacaggaccgactttgaccgagccatgttgttatcagggattgaagatttcaggttccatgaccttcgccatacctgggcgagttggcatgttcaaagtggaactccgatcatggtgctgaaggaattgggcggatgggagaaacttgaaatggtaaataaatacgcccacctgagcggtgaacatttaagcaaattcagtggcattgtcacgtttctggcacacgacgctggaagtggtgaaaacgccaaccgaatatcgcttgtaagttaatgaaataaaagtaaatttacgccaaccattaatcactaatcggcgatagcatcagataaacagtctgatgttgctattgcctgaccacacaaagtatgtggcctgtaaattactggttaaccgtctcttgcggtgccagtgggttacggctgataaacatcgcatcgccgtaactaaagaatcgatattgctccgccacggcctgctgataggcattcatggtgtttttatatcctgcaaatgcagaaaccagcatgatgagcgtggactctggtaaatggaagttagtaaccaacgcatccacaacctgatactgatatcctggataaataaagatacgcgtatcaccgaagaaaggagcaattaagccattctcacaggctttggctgcactttccagagaacgaaccgaagtcgttcccaccgcgaccactcttttaccccgtgctttacatgccaataccgcgtccacaacctctggcggtacttcggcatattcggaatgcataatatgttcttcgatgctttctactcgcactggctggaaggtccccgcgccaacgtgcagagtgacgaaggccatttcgatgcctttttctcgtagcgcagccagcagaggctcgtcaaaatgcagccctgctgtcggcgcagccaccgcgcccggacgctcactgtatacggtttgatacagttcgcgatcggcatcttcatcagggcgatctatataaggaggcaatggcatatggccaatcgcattcaaaatactgaaaacgtcctgttcttcatcaaaacgcaactcgaacagcgtatcgtggcgcgccagcatggtggcgcggatactttcattgtcgcccagaagcagctcagcgcccggtttcggcgcttttgacgccctaacgtgcgccagtacccgatgatcgtccaacactcgctcgaccaacacttccagcttgccgccgctggccttacgaccaaaaaggcgtgccggtatcacgcgggtattgttgaaaaccagcaggtcgcccgcttccagcttatccagcaaatcggtaaaaatgccgtgggttaactccccactcgggccatccaacgatagcaaacgacagccactacgctggggctgtggataatgagcaatcagtgactctggcagctcaaaagaaaaatcggcaacacgcatggttttccactttagacgacaaaaacaggccgcctagtctagagccgccaagggttggctgcaagaattaagcaagataacctgctatttggattatactctgcggatgaattttctagctcaccttcatttagccagtttgtccgacagctcgctactgggcaatctgatggccgacttcgttcgcggcaatccgcagcatgattatagccaagaggttgtggctggcatcatgatgcatcgccgtgtcgatgtgatgactgacacgctaccgcaggttaagcaagcgcggctctactttagcactgattttcgccgggttgcgccaatcacgctggatgtcctgtgggatcattttctggcacgtcactgggatgaattggtgccagacatcgctctgccagcgtttattttgcaggctcagcagcaaatcattccgcagctcccgcatacgcctgaacgtttccagaatctgaatgcttatctgtggcccgaacgttggctggaacgctatgccgagctgccttttatcgcgaatgtgttacaaggcatggcgaatcgtcgtcctaaactgtctgcactggctggctcgttttacgatattgagcaacattatcaaccgctggagcaggtattctggcagttctacccacaaatgatgcacaaagcgcagcataaacagatttagcctatcggtaagtctggtatggcttatttgatttaagtcacttgctctttatgtcaaagtgggtatcttaacaagacaaaagatacaaaattaagttattgatagatagaaactatcacagcaattggtatatagacctttattgattgtggctaactccctatgctgtgacgaaagttttatcccaactcgttaatccatccctattaacaggagtaatttatggttctggtaactcgtcaagcccctgactttactgcggctgctgtacttggtaacggcgaaatcgttgaaaacttcaacctgaaaaagcacctgaacggcaaaccagccgtcctgttcttctggccaatggactttactttcgtttgcccttcagagctgattgctttcgatcaccgttacgaagaattccagaaacgcggcgttgaagttgttggtgtttcttttgactcagaatttgttcacaacgcatggcgtaaaaccccaatcgaaaacggcggcatcggcgaagttaaatacgcgatggttgctgatatcaaacgtgaaatccaacaagcctacggtatcgagcatccagatgctggcgtagcgctgcgcggttcattcctgatcgacaaaaacggtgttgttcgtcaccaggtagttaacgacctgccactgggccgtaacatcgacgaaatgatccgtatggttgacgcgctgcaattccacgaagaacacggtgatgtttgccctgcacagtgggaaaaaggccaggaaggtatgggcgcttctccagacggcgtagcaaaatacctgtctaaaaacgcttcaaagctgtaatcaagccgaagtgaaattgggttaaatcctgatttaatcgaataatatcaaccagtcggttcacgctgactggtttttttacgcccatacctttcccagcaccatcgcctctctccttttcttgttactgccccttattagtgcaacgtgatcccaccgacatttttctacgtcacttttaattgtcctgctctccgcgctgcaaaacggctcgcaccgagctaatctgtaaccggttagttaataaacaaatcatttgttattaaataaataattggcgtgatgtttgcaccaaaaggtgttgtgaatactcggcaacaccagggacttaacccgtagatatgtcagagatttatgaaaaataactcattacaggagtcagtatgcttttaaaaaaatggacgatgcctttgactgtcgtagccttgttagttagcggtaacttacatgcagcctctatgccagcagtggaagctaaaaatggcatggttgtttcctctcagcatctcgcttctcaggttggcgttgatattctgaaaatgggcggtaatgcagtcgatgcagcagtggccgtgggctatgctcaggcggtcgttaatccttgttgcgggaatatcggcggcggcggctttatgaccattcatttagccgatggtacagacacctttatcaatttccgtgaaacggctccagccgccgccagcgccgatatgtatctggataaagacggtaaagtgactaaagatgccagtctgtacggctatctggcctccggcgttccgggaaccgtattgggcatggacagcgcacagaagaaatacggtaaattaacacgtaagcaagtgatggaaccggcgattcgtctggcgcgggaaggttttatcctaacgcgtgctgatacagacattctcgataccaccaccaagcgttttcgtgaagatcctgaatctgctcgtattttcctgcgtaaagacggttcgccctttgaaccgggagatagactggtacagaccgatttagccaatacgctagaagctatcgcagaaaaagggcctgacgctttctatcaggggaaaattccacaggcagtggaagatgcatcgaaaaaaggcggtggcattctgaccgcggcagattttgccaactatagaattaccgaaaccgcacctgttacctgtagctatcgtggctataaatttgtttcagccccgcctcctagctctggcggcgtaaccctgtgcgaaacgctgaatattctcgaaggttacgatgtgaaaagcatgggctttaactcagcggcctatattcatacactgaccgaagccatgcgccacgcctatatggaccgcaacaccttcctcggcgatcctgaatttgttaaaaatcctatcgatcgcctgctcagtaaaagctacgccgatgagattcgtaaacaaatcgtgccgggcaaagccacgccatcagaaaatgttcagcccggtaggcaacctcacgaaaaaccggaaacgactcactattcgattgtcgatcatgaaggtaacgccgtttcaaccacttataccgtgaacggccgctttggtgcagtcgtcatcgcaccaggtaccggtttcttcctcaatgatgaaatggatgattttaccgtcaaagtcggcgaacagaacctgtatggattggttcagggagcgactaacgccattgcccccggtaagcgcccactatcgtctatgagcccgacgttagtgaccaaagatggtcagatctatatggttctgggttcaccaggcggttcgcgtatcatcactatcatactacaaactgcgctgaatattatcgatcacggtatggctccgcaggaagcggttgatgcgccacgcattcatcaccaatggttaccggatgaggtgtattacgagcaacgcggtgtgtctgctgacagcctgaaaatcctgaaggaaatgggctataaaatggttgaacaaagcccgtggggagccgccgagttaattctggtgggcttgccgaacgtggcgggcgtgtcgccggctaattcaggcaatgactctgcggtttcaggcaaagttcgggaaggttatctctacggtgccaacgatgttcggcgcccggcaggtgcagccataggttattgataaattagatttatttatatctttcgatttagataatgaaataaagccccacacctgaacgactgttcgataaaacaccccatccgttatggatggggtttatggttaccaaggcaatgcgcgcccctgataatcgataaaagcatggccgcccttacctgctaacttctcaacctgatccaccacgccacgcacgctagtgctaatggttaaaggtgcagcatcaccgcccatatcggtttttacccagcccggatggaaggacaataccgttaatgaattatccgccgtttctgccactaaatgacgtgtcatcatattgagcgcagctttactggctgaatacaaaggcttatgcccgctctcattgctagtaatactgccaagctgcgaggacataaacgccaatacgctgttatgtggcttgcgataaggcaataaatgctcggcaatacggataggagaaacggtattagtttggaataaggccagaatttcttccggtgtcgccttgagagcagattcatgctctgggcctgctacacccgcgttcacaaaaatcagatcaaattgctgccctgcaatctgtggcaaaaatgcctcaatgctggccggctgattaatatccaataccagccagcgagagtgattggcaccggtttctttggcgtgctgacgagtcgtggcagtcaccgaccagccgcgctggttaagttcatccactagacctaagcccagcccacgagatgccccgataattaatgccgttttcttagttgcgctcattgtttatccttttccactcgtattgccgcattgacgcttaatgattagcagcgggaatattcaccataggacaaaaacggcaaggaaaaaagtggagaaatcagtcgctgtaattcaattattttgaatccacggcatttttcgctgtggattatgggctttagtttcatgtcagactcatagagtcagtacttacccactccgcgccacaggctgaagctttctccagccaattgcagatttacattctgcgcattcaacatgagctggctatcaccttcctcacgccgccagttttctacattaagcagcggcgactccggtaaactaatttcagcgccctgaccgcgctgcaacgcgatcaatactcgctcctgtcggtaagtgcgcacaaacaccagtgaatcaccactggcgaacaccacctgacagccaccgcgccgtagcgctatactttctcgccgcagggcaatcatgcgctgactcaactcaagcagttgtcgatcccactgattttcatcccacgggaaggttttacggcagaacggatcgttttcaccgtctaatcccacttcatcgccgtaatacaggcaaggcacgccgatccagctaaacaaccagcctaaggccattttcatgcgggattgatcgcctttcagcaaactcataaaacgagcggtatcatggctatccaactgattaaataagcgtagctggcagttatgggataaaccggtgcggtagccgtccatccattgaacgcactcagccgcatccagcgttatcgggtgagcagcaacgtcaactccggccaaaaatgcccgaaccggtaacgcaaaccccatataattcatcgccgaatcttcaacgcctgcctgtagccagttacgcgcatcaccaaaatgctcacccaaaatataagcttggggattttcttgtttagccgcctgataaattcccgctaaatggcgcagattccccttggccccccccctgctctccaagcatatgaaccacatccaaccgccagccatcgatactgtacggcgggcgtagccaatgacgcactacgctatcatcagcctggtaaatctgattcaccacgccatcagcggcaaaattcagcttcggcaagctacggttgcctttccagtccaacgcctgcccgtcgggatagaagttaaaccagtcgcgataaaccgattcgacatcgtggcaggcgccaccggttccctgttgatgccggtcaaaccagatatgggaatcaccggtgtgattaaagacgccgtccagtaccagcttgatgcctgcgctatgggttttttcccgtagttgcagaaaagcctcattaccacctaaatagggatcgacctgataataatcttgcgtgtcgtatttatgtacgctgggggcggtaaaaattgggttcagatacagcgccgtcacccctaaattttgcagataaggcaacttttggcagataccggctaaatccccgccgtaaaatgtggaagacgcatgaatgtcttccagcggctcatcccactctcgccgcgccaccggacaatcggccgcatagtggaaatagctaccgttttgcacgcagtgactgccctgactactggcgaaacgatcgggaaatatttgataaaaaatctgatcggcaacccaatccggccccgagtcaggtacatcaacggcaaactgcgccagctgagccggaggcaccaccgaaaaacccagcggactaaaccattgctggcgatcggcccagagcaatttaaaacaatagcggcgagtcggctgcccttcacgcagtggcaaagtcccgcgataacggcgaaaaccatcgtgatcgcgacctttcatcgtcagcagccactcttcattatccggctcacagcgcaaaaaaacctgctccggtaagtcatcaccctgtaaccatagactgatgtgtaatgtgtcatcacgtaaatgtatgtaagggggaaccggtaaatgccaaccactaagcatataactctccactattcagcataattatcgcgcgatctgacccaagagcgcctatagcatcgataaagtgacccaatatctcaatatgccaacgatgccatgttgctggtgcaatcccctcatctgtcagcataaatatcagggaggagccggggggaggaggaagcagaaacaagctttacctcaggtatactgcccgctgatgacaaaataaataacagggagaatgccatgggcgtagcggattatctggataagattattgactgggccaataagcgctcagatattaccgcactgattctgaccggttcgctggcgcgtcaggatcggatgatcgacgaactttcggatatcgatattgaaatcattgccgaacgaccgcaggatctcctgaaaaacagcgactggatcggcgagatcggagacatactgacctatctcccgctcgatcccgatgaaaatcaggcgtgggcaacccggctggtgttctaccgcgatggaaccaaggtggattttaccctcgcagatagtacgcggctgcaaaccatgatcgatgccgcaacgctggactcgctgtaccagcggggctatcgggcgttactggataaaaatggcgttgcttctcagttacctgccgccagcggaataagccagcaacccccattgcccactcaaaaacagtttcaggccagcgtcgaggaattctggtttgaagccgctcatattcctaagtatctgtaccgtggggagttatggacggtcaaactacgagactggaccatgaaggagctattactacagatgatggaatggcaagcactggcaaaatcaacatcggacgtagatacctggcatcaaggtagccatatgccgcagtggctggcaccacacatatggcaagagctgcaccaaacctttggtcaatttgatgcggacagcgcccgccaagccttttacgccagtattcagctttatagccagctggcgcgtaaagtggctgaatcactcagcttaaagtatccgcagcaggtcgaagatggggttttgtctctttgtaaaaaaatcgaaaaactgcctaaaactaaccgaacgcattaaaacgtcacccataaaaaaaccgggttattagcccggttttctggatgtattcaatcggcaaatattatttagataatgctaccgacgcagcctgttttttctgaaaacgcactttcaggtagtagcccgccaacagcaaggccacccatatcaggccgacatacagcgaaatgcgcgtcgttgggaaataaccaatcaggccgataataaatagcaggaaaataatcccagcaaccgaggtaaacaccccgccgcgcagagggaaatccaatgctttaacctgatctttggtcaatgaacggcggaaagcgatttgggaacacagaatcatgatccacacccaaacggtcgcgaaggtcgcaagtgatgcaatcaccaagaagacattttctggcatgatgtagttaagataaacggcaatcagcattgcccccatcatcaccaacaccgtcacccaaggcacaccgcgcttagaaatcgcaccgaagactttgggcgcgtggccttgttcagccataccgttcagcatacggcccacgccgaatacatcgctgttaatcgccgataaagacgcggtaataaccacaaaattcaggatacctgcagcaatagtaatacccaaatgctggaacgtcagtacaaatgggctaccgtgagtgccgacctgattccacggataaatcgacataatcacaaacagggtgcccacataaaacaccagaattcgccacggcactgagttaatcgctttaggaatcgattttttcggatcttctgcttcaccggcggtaataccgatgatttcaataccgccgtaggcaaacatgaccagctgcagcgacagcatcatgccgacaaaaccgttactgaagaagccgccgttcgtccacaggttatgaattcccgtcggttgcccgccgttgcctatcccccagacaataatgccgataccggccaaaatcatgatgatgatggtggcaactttgaagaaggagaaccagaactccagttcgccaaagaccttcacgctcatcatattgatcgcaccgataatcaataccacgctcagcacccatatccaatgaggcacgtcagggaaccagacgcccatatagataccaaaggcggtcacatcggcgatagcgacaatcaaaatctcaaagcagtatgtccaaccggtgatatagccggccatcggccccagataatcctgcgcataacgggaaaaggagctggcctgtgggttattcaccgacatctcacccagtgcgcgcatgatgataaaggcgacgatgccgccaatcagataagccagcaacacgcttgggcccgccattttgatggcgtccgccgagccgtaaaacaggccggtaccaattgctgaacccaaggccataaaacggatatggcgagtagtcagcccgcgttttagcttatttttgactggtaattccataacaatatcccgtcttctttcagcaaaaagccacgagcaaaggcgcgtggctaaagatactctcttctgcggcaattactgtttggcagtaactcgttgacgtccacaaatgcgatcgtagaccgctaccaccaccagaatcaacaaggaaggtggcaaccaagacaggccttggcccgccaacggtaactgttcagtccaagcaggcaggaaatgcgcaaaggtcgatgtcttgattccacccaaaataccgaacaacaggctgaccaacatagttggagccacgatacggctggcattacgccaccaacgcagagtgaagctcagaatcaccagcacaatacacggaggataaatcgccgtcattactggaatggaaatttgaatcaaatggctcagccccaaattggataccaacatggagaaaatgcccagaatgaataccagcgctcggtaagacaacggcagatattggctaaagaattcggctaaagcacaggtcaggccaaccgcagtgaccatacaggcgatgaagatgagcgccgccaggaacatactgcccaaaccgccgaaggtatgctgtacgtaagcatgcagaatcactgcgccgttttgcgcatcaggtaccaacgtaccgctgctgccacccagtttgaacaggctcaggtaaaccagcgtcagacccacaccagcgattaagccagcccaaatggtgtagcgagtcagcaagccggaagaaactacaccgcgagaacgcgcagcattcacgataacaataccgaataccattgctcccagcgtatccatggtcagataaccattaacgaaaccggaagagaaaggcacttgctgatagatttcggttgcaggaatctgcgggccagcaggccacagaaccgcagcaacgcccaaaatagccagtgcagcaattttcagcggagccagaatatgcccgacggtgtccagtagacggcctgggtaaagcgaaataccaataaccagcgcgaaatagatcaggctataaataaacaacggcaatgggccatcgccagtcaacggagcaataccaatttcgaaagaaacggtcgcagtacgcggagtagcaaacagtgggccgacggccagataacagacggtcgccaaaaccaggcccgcagtacgaccaattggcgaactcagcgcatcaataccgccaccaacgcgcgccaatgcaataacggtgatgaccggcagacccacggcagtgatcaggaagccaagtgcggctatccaaacgtgctcgccagactgaaggccaaccataggcgggaaaatgatgttgcccgcgccgacgaataaggcaaaggtcataaaacctaatgccagtatgtctttagatgataaacgatgactcatagtggttgtcgtgttgcctagttaaaaggaccaaaaaggaaaaccctgggttgttgtctttccggctcgatcgaaaacgctataacgcttcacagagagcgctaatttccgactaatcggtttcgatgatttgcagtgtttttgaagttatatgcagatggaataaaccaacaacgggggctaagtagaacgtttatagcggagaaaggcaagtctggatcggaaaagcagagtcatcaaccagataattcttcaatactagttaaacatgtcggttattgagaaatacacgccatatgatttgtatcatttttaatcaattattagcattgggcggccttcaccgcccaaaaactcaccaaatgtcgttagcaatatcgactaccagcctgagttttttccactgatcctgctccgtcaggctattcccttcttccgtcgaagcgaagccacactgtgggctaaggcagagttgttcaatatcgacaaatttggccgcctcggcgatacgttctttcaccgcctgcggttgttccaaggtgccatttttcgaggtaatcagccccaaaaccacctgttgctgccccggtttgataaagcgcagaggttcgaaaccaccggcacgttccgtgtcatattcaaggaaaaaagcgtcgacgttaactgtgccaaacaatattttcgctactggctcataaccgccctctgaaatccaggtcgagcggaaattaccgcggcacacatgtaaaccaatagtcaaatccgccggcttgcctgccagtgccttattgagcacctgagcatagatctgcgccaactgctctggatcttcaccacgctctctgatctgacgctgctgatcgtccgaacacagataagcccacacagtatcgtccaactgtaaataacggcagcccgcatcataaaaggcctgaatagcatcacgataggtctgagctaaatcgtcaaaatacgcggtcagatcgggataaacctgcttatctatagcgttacggccaccgcgaaaatgcagcacgctcgggctggggatagtcattttagccacggagtttccggcaatactttgtaaaaaaagaaaatcctccagcattggatgggatttaaagcccagtttgccaaccactttgatactgcgagcgcgcgtctgaacgccgttaaactgaatgccctgctcgacatcgtaaccttcaactccttccaaaccttcgaagaaatcgaaatgccaccaggctcgacgaaattcgccatcggtcaccaattgcagccccgcctcctgctgctttgccactatgtacctgatttcgttatcttcaatttcgcgtaactggctagcgctgatatcaccgttcaggcgctgctggcgcgcctgtttcaacgccgcaggacgcagcaaactgccgacaacatcggcgcgaaaagcaggggtcgttctttgcataacaggctccagatcctataccgccgactaaagccgccacggcacaaataatttaccgaatggatagtttctttgagttacaaatagacatccagacgtccaaataaattgactggagagtgtcatctcaccgattttgattcaatagaggaattttcactgcatatgaaataaattcatatccaactaaattagtgggtaaatcccagcgctgaacgggcctttttcaagctttcttgcgataaggggagatagccgtcacgactcaccagttcttgcccttctggagatagaattcgctgcaagaacgccgccgttagcggttctagaggtttatcaggggctttattgacgtagatataaagatagcgggacaaggggtaacggccatttcgaacattttcggcggttggcatgacgtaatcctgccctgataccgacaaaggtaataatctgacgccactggcgcgaaaaccaatgctggcataaccgatactgttcagcgaggttgcgacagcctgaaccaccgaggctgaaccaggtaattcattgacctggctgcgaaaatcgccgccgcacaaagcacgctgtttgaaataaccgtaggtgccggaagctgagttccgactataacgctggagagaacgcccagcccacgggcctttcagcccaagatcagcccataagtttactggcttattatcaccacataattgattttgcgaataaatggcgtccagctgtgacaaactcagccccaccagcggattatcctgatgcaccagaaccaccaacgcatccaccgccacaggcacggctaaaggaggatagccatagcgttgaacaaaagcggcaatctcggcggctttcatcggacgactcatcgggccaagttgagctgcacctgcggccagagccgtcggtgcggttgacgaaccggcggcctgaatttgcagattaatactcggatactgatgattgaaatcttccgcccacagagacatcagattcgccagcgtatcagagcctacgctggaaagattaccggaaagcatcccaaccggtgcctgagcaaaaaccggagtgctgacccataacattgcacccagtaacgccgttttgctccatttcatcatcagaatatcgtccgtaaagcctaggttttgaccgcattctcagctaaaaccgtgggaacaatcaatcgcttcggtaaggtgaagacaaaacgcgtccccaaaccaatttcactcatgacctctaaacgcgcatcgtggtgactcagcgcatgtttaacaatcgccagcccaagcccacttccgccggtttgccgcgaacgggctttatctacccgatagaagcgctcggtaagacgaggaacgtgctccggcccaatgcccggcccgttatcactgacctgaaactgagcgccctgcggcgtcaattgccagcacacttcgatttttgtaccggttggcgtgtgatttaccgcgttatacaccagattggatacggcactgcgcaactggtcttcattaccaaacactttaagctgttcattcacgcggaaagtaatctcatggcgaccgctgcttaacgcctgaacctcatgctgtagtagcttcagcatcagtggaatatccactcgctcattcatatccacatttggtgctgcttcgatttttgataacgtcaataattgcttcaccaaaccgtccatccgtttggtctgctcttgcatggtattcaaggctttaccgcgcaatgccgcgtccagttcctgatcgtgcatcatttccagatagccttgcagtacagttaacggcgtccgtaattcatggctaacgttggcaaagaaatttcgccgcgcgccttccagttgacgcatttgcgtcacatctcgcgccaccatcagtaattgcccttctgaataaggcataacgcgaaactcaacgtaatggccattattaagctgcacggtcaatgggcggctgaattcctgctgttgcagataatgggtaaattccgggtaacgcagcaggttaagaatgtgctggccgttatcttccggccaacgaaagcccagtaaattctgcgctaatccattacaccaaaagatatttccctctacggtcgtcataaccaccgcatcgggcaaggattcagcgccgctgcggaaacgttttatcaacagcgccagctcacgccgccgccgccgattacgcagttgcatctgataaagaccataaaacagcggctcccagctccagcgtccggccggtggcgtcatgcttcggtctaaccatagccaatgagaaagtttaagctggttataaaaattccagatcagcgctgccaatactgaaaccagtaatagccaagggagataaccaatgaaaagcccgagcaatagcgcgggcagacaaaaaagtgccagctcaatagccagccttttccatgataagcgttctagcacgacacattctccggcactacatacttaatagcgcgttgagaaacggtatccggtgccccggacggtttgcaccattttgtcatgcccttcggattcaagcgccttgcgtaaacggcggatatggacatcaacagtgcggtcttccacataaacgttagtgccccaaacataatttagcaactgctcgcggctgtaaacccgctccgggtgagtcataaagaaatgcagtaatttaaactcggttggccccatgtctaacgctttttcgttagccatgacccgatgagaagaaggatcgagacttaacccttgcatttcaatcacctcttccacggccatcggtgaaattcggcgcatcaccgctttgattctggcaacaagctctttgggagaaaaaggcttggtaatgtaatcgtcggctcccacttccagcccgcgcacccgatcctcttcttcaccgcgggcggtcagcatcatcaccggaatatcccgggtcatggcttcacgtttcatatgcttgataaactgaatcccagagccgcctggcaacatccagtctagcagtaccaaatcagggaaaggctcggacaagcgcgtaaccgcgctgtcataatcttcggcttctaacggttggtagccgttttgctccagcacaaaacacaccatctcgcgaatcggcgcttcgtcttccaccaccagtatgcgtcttgccatcgtcaatcctgccaatatgttagcggttgctatttgatttccgcgccattatgcgtcagttttatgacagttttatgaaaaaaaccatccctttgcagccaataagcatagcggctaaccgaaagggtgttgcaaggttatttcagcaactttgcgaagccgttctgggatttcaaccaatcctcctttttaaccgcgacatccccttctcaacgtttataatcagcgccattgattacctgccctagcgggagttttatgcgcattatacatacctcagactggcacttaggccagtatttcttcaccaaaagccgggcggcggagcatcaggcttttttacgctggctaatccaaaaagttgaagaacatcaggttgatgcgttaattgttgccggcgatatcttcgacacaggttcgccaccgagctacgcccgcgagttatataaccggtttgtggtcgatcttcagccgacgggctgtcagttagtggttcttggcggtaaccatgattctgtcgcaaccttaaatgagtcacgcgaactgttggcctatctcaataccaaggtgattgcccacgccagcaacgatctggaacaacaggttttcattctacacgatcgtgaagatcagcccggagccattctgtgtgcgatcccttttctacgcccaagagatctgatcgccagtcaggcgggagaatccggatcgcaaaaacaattagcactacaagaagccatcgcggcacattatcagcagctttatcaaacggcggtcaacctgcgcaagcggctagcattacccttgcccattatcgccacgggtcacttaacgaccgtaggcgtcagcacctccgactcagttcgagacatttatatcggcacgcttgacgccttccctgctcaggctttcccccccgctgattatatcgctctgggccatatccaccgcgctcagcaggtagcaaagtcggagcatattcgctatagcggctccccgattcctctcagttttgatgaactgaataaagagaagagcgtatttttggtggagttctcagggcaaagccttgccggggtggagactctgactgtcccgcagtggcaaccgatgcaattaatcaaaggggatttacggcagatagagcagcagctcgctgcctttagccaactttccggcccaccggtatggctggatattgaagtcgccacccaagactatctcagcgatattcagcgacgcattcaggcattgacggagaatctcccggttgaagtggtactcctgcgccgcagtaaagagcagcgccaaaacagtattcatcagcaagagaaagaaacgttgaatgagctaagcgtcagcgacgtattcgaacgtcgcctcgcgttagaaacggagctgaccgaacaacggcagcagaaaatgcgggaaatgtttcaacaagttgtcgatgaagtcacgctgaatgccgatgcaagagaagaataagtatgaaaattttaagcctgcgcctaaaaaacattaactcattacaaggcgagtggaagattgattttaccgccgagccttttgccagtaacggtcttttcgctattactggctcaaccggtgccggaaaaacaacgttattagacgcgatctgcttggcgctgtatcaccaaacgccacggataaaagtctcacccagccaaaatgagctcatgacacgccacaccgctgagtcactggcggaagtggaatttgaggtaaaaggcgtcagctatcgcgcattctggagccaacgacgagcaaaaaactctcctgaaggcaatctgcaagctcctaaagtcgagttagccctatgcgcggacggtaaaatactggcggataaagtcggtgataaattgtcacttatcgcctcgattaccgggttggattttggccgtttcactaaatccatgatgctatctcaagggcagtttgccgcctttttgaacgccgatgctaacgatcgcgccgagctgctggaggaattaaccggcacagaaatttacggtcgcttatccgagcaggtctttgaaaagcataaacaggctaaagccgagctagatgccttatatttacgagccaatggcattgagctgatgaatgaagaacagcggcaggatttacaacaacagttagacgcgctgcatcagcaggaacaacagttcagcgtcgaattgctcaatctgcaaaatcaggtcgcctggattacggttttgcgccagttgcaacataatgtgcagcaatacgctcaacaacatctgcaggtggaagaagagtatcaacgggttcagcccgatctccagcgtttggcgcgcagtgaacccgcagaaaaactgcgtccattgcaacaagaacgggatcgctgcctgcaagattggcagcaagcgcagcaacatatcgcaaccttaaaacagctgcaacagcaacaacagctacagctctcgccgctgacgctagccttggagcaggccaccagcgcccagttacagcacgctgaacgacagcgcgagaaggaaacactgattgaacagcatataattcctttagacaaccatattgccgctcaacggaaaaccttgtcgcaactcgatgaggataaacttcaacagcagaataaaacgcagaaaagccagcaacagcttgaacaagatgaacgcctgctaatggaaactcatcaggggctgcaacagttagctgactacattcagcaaaatactcatcatcaacattgggaaaagcatctgccgctctggaaagaacagttccgtcaacagcacagccaacgccaacaactcgctgataatcagcaaattttgcaacaacaagcggcgcagattgttgagctgcaacagaaattcgccgtactaagcgctcaaggcgtacagcagcaagctgcattggcgcaagccacaatgcaggctgacgccagcaaacaacagctggaggcgctagaaaaacagcaacctcaggcacaattgcgtcaacggcttgctgaacttggcgagcaaagaaatacccgtcaacggctcgcagccttatcgccgctggctctacagctacaggcccaacatcagaaaaaccaacaatatctgctcgatcaaaaccagaaactggtacaactcgagcagcagctgatagaaaaaagacagcaatacgcccaacaaaaacagcaccttgctgatttggaaacgctatgggatcgcgaaaaacagattgtgacgttggcggcagaaagagccaaattgcagtcaggaaaagcctgcccactgtgcggatccctagaacacccggctatagccgaatatcaagcggtaaaaccgtctgaaactgcgctgcgcgtggaggcactacgtgcgcaggttgatgagctgtctaagacgggcagcggattaaaagccgaaaaagaaaatctgcagcagcagaaatcacgtctggaacaagaattacgacaaagtggtctgcagttagctgaacatcagcaaaactggctggcgctgaccgcgcggctagctctgaatttcactctggatgaaccggctcagttaactgcgtggctagagcaacaggagcaggaagagcaagaatatcagcagaaactgtccgaatttgagcgactcaaccaacaatatcagcgagctaaagacgcattggttcaagccgagcagaatcagcagaagaacctgagtgaagtcggcctgcaacaacaacgcctgcaaaacattcagcaatctcagcagcagttacagcagaccgaccagcgtcagcaggacgaatatcgactgcagcaacaggatttcctcaatacattaatcaatctcgatctacagcagccggagccagagcagcaaactgagtggctagatctgcgggaatatgaatggctgcgctggaagcagaatcagcagaatcagcaacagctggtattacaacaaaaaacgctggaaacgcggatagaaagcgaacgccagcgccaaaaagaataccgcgaccaattattgaatattgagcaaaagctcagccaggcaaaccgtgcgttgcagcaatatattcatcaacgtcaagagctgtttggcgataaggttgttgccgacgaacgacaaaaactgcgaacagagcaacagcaaatcgagctagcgcaaaaggccgccaacgaagcactgcaacagttgcagtctcagttgagccgattgggcggtgaattagctcaactggaacagcagttgcagcaatatcagcagaaggccacccaaactcaggccgaattccaacaggctcttgccgccagcgagtttgatactgaagtcgcttttgcagcagctttattagatgaaggccaacgccactctttacttcaactgcaacagcagttgaatgaacgcttgcaagaagcagtaatccgcttgcagcaagcgaatgacagcctcaaccaacacctgaaacattgtccgtcaggtatctccccacacagcgatttatccgaacggaaaggaattgcagagcagatggctctgcagctaaaagctaacaccctgcgtcagggggaactgcgtaatcagttagagagcgatacacatcgacgtgccagccaatcagccctgttcgagcagatagaacataaccagcagcaatacgatgactggaactacctcaatcaacttattggttcaaaggaaggcgataaattccgtaagtttgctcagggcttgactctcgatcatctggtttatctggctaataaccagcttaaccgactgcatggccgctatttactccaacggaaaaccaatgatgcactggagttactggtcgtagacacctggcaggccgatgccattcgggatacccgcacgctttcaggaggtgaaagcttcctggtcagcctgtctctggcattagcactttccgatctggtcagccataaaaccagtatcgactcgttgttccttgatgaaggcttcggtactttggatgccgaaacgctggataccgcgctggatgctctcgacagcctgaatgcgacgggcaaaaccatcggtgtgatcagccacgtcgaggcaatgaaagaacgcataccggtgcaaatcaaagttaagaaaattaatggattaggcattagcaggcttgataatgcttttgcagttaattaagcgcagagttatggaaagatgaagcaagaagcagccaaaatccaagctcagaccgtaagattacttcatatcaactcgtgaatgcctagtgaacgttgaatctagagtttgtggcattaggtaaattagcaccctttgctattaatctaatgccgctttcgccaaccaatagccgcttattacaggttgagaaaagcggctattcatattctctaatacataatgaaattaagcgtcacatagagatctagcatgtattgggtattgggtattgggtattgggtattgggtattgggtattgggtattgggtattgggtattgcgcataaatatagccattgatggacaaaggcaacggacgaggctattagccaccaaactgccctgataagattcctgatatgcctgtagccgcccgaaggagcgacagtcaggcaatcacactattgctgtggccacagccatgcagcaccacgcacgccgctggagtcaccgtgtatcgccttgtgaatcggcgtttcacactccccgccgaatacccacggacgtatcaaatcaggcaatgtacgatacaaacgatcgacgttactcataccgccgcccaatacaatcacatccggatcgaacaggttaatcacgtgagccagtgatttcgcgaatcgttgctcatagcgttgcatcgcctgctcggcaataacatcgccttgttccaccagagtaatgatttcatgtcctttcaagagattgccgcttaaacgaaaataatccatagcaaagcccgtacctgacacaaaggtttcgatacagcccttcttaccgcaatagcagggaacctctaattgataacgttgttcatcctcatcctgccacggcaacggattatgcccccattcaccggcgataccgtttccaccagaatgaacacgcccgccaatagcgatacccgacccacagccagtaccaataattgccgcaaagaccaaatgtttccctgctccggcaccgtctgtcgcttcggaaacagccagacagttagcatcattagccagtctgaccggacgggcaagcaagtcagataaatcgcgatccaacgtctgcccattcaaccataccgaattggcattttttactttcccactaaagggggacaaagtgcccggaatacctacgccaacgcttcctttttcgccagtagctacctccgcatccgtaaccaaaccggcaatagccgataacgtttgatgatagtcatgacgaggcgtttcaatccgcttacgaaaaagctctcgcccatcattcgccagtgcaatgacttctatcttagtaccacccaaatctataccaatgcgcattgcgcctcacctcattgagctgatgactttattttcagcgaaattttttaacggagtcacgcatcattccgcaaattcagacgtgccgattattagctattgcatactagtttggacaatcattaggtatctcacaatctttgcatttatctatttgacgctaccgacaatttaaataattcatcaccctcagcgagccatgcgttgtagtactttttcacgcaatatttcgattcagcccccaattcatcacgctattttgctagggactgcggcttcaattcgttatcatgccgccctgcgtttgattaacacgcgtgctttaagcgcgcccgagcttgggataacactatgctgtggtttaaaaatttaatggtttaccgtttgagccgggaagtttcactgtctgcggacgaaatggaaaaacagttaagcgccctttctttcaccccttgcggtagccaggatatggccaagaccggttgggtgcctccgatgggctctcacagcgatgctttaacccatacagttaatgggcaaatcattatttgtgcgcgtaaagaagaaaaaatcctgccttcaccggtgattaagcaagagctacaggccaaaatcgagcgtttggaaggtgaacagcaccgcaaactaaagaaaacggaaaaagactcgttaaaagacgaagttctgcatagcctgttaccgcgcgctttcagccgttttaaccaaacattcctatggattgatacggttaacgatttgattatggtcgatgcggccagtgccaaacgcgccgaagacacgctggcgttgctgcgtaaaagcctgggttcgctgcctgtcgtacctttaactttagaaaaccctatcgaactaacattgaccgaatgggttcgctccggtgaattacctgccggtttcgcgttgatggacgaagcagagctgaaggctattctggaagaaggcggcattatccgctgcaagaagcaggctttagtcagcgatgaaattgcggtacatatcgaagcgggtaaattagtcaccaaattggcacttgactggcaagaacgcgtgcaattggtgctgtctgacgacggttcgctcaagcgcctgaaattctcagatacactgcgcgaacaaaatgatgatatcgatcgggatgatttcgcccagcgtttcgacgccgattttattctgatgaccagcgaactggcagcattgatcaaaaacctgattgaagctctgggtggcgaagcgcaacgctaagtttgccgcgcatttgaagacgttgccccctctggcatggagagggcaatattttgattagcttaggtatttacacagataagcagaggcttctgcaacttgcaggttaaattcactctgtccaggaatgtaaaaagtttctcccggcataaacacctgccagtcaggagagcctgggatcaagactttcaatgccccagtaattaccgtcatttcctcgggttgggcggtactaaaagtgtattccccttcttccattaccccaacgctcgcgcgcccaatgctgctactgtcataaccgatggacttcactttcccggtaaaatattcattaaatttcagcatagtttggcacccgcatcctaatcattgatgagatttcatattagggtcacagcattgattctgtcactgattattacgacaaaatgcgatcgcaagccgattcactggggtggttgctgataaagcgtacaatagaggcaaaaaaaccggggcaatcgaccccggtgatgataacaacagaagaattatctaatcacagcgttacataatcagttcagcagccagcttcgccaccagcacgtttgataacaaaaccggtattccgagccgacgctgtaaaaaatcgcgatgtttttggtgatagccaatgcaatccagcacaacaacctgtgccccctgttgcagcagcgtttgcgcagcttgctcaagtgcctgctcatcggccaaataagggctggcgatggcaaaacagggaggtgacgccagcatttcccacttggcggcctgctgttcgatttgctctgagagtggcactacgatcccgacctgatgatcgctgacaatcgccgcgatcaaaggcggaatgatgcgatccggctccagcagcagtgcctctcgggttttcaaatgatgaaactgcccggtgcatagcagtaaaataatgcgacatccctgcgcttcaagttgctcaattttctgctgtaaaccgcgttccactttgcttgcagccaaagaaacctgagtgccatcgctcaaacgcgaaaccagcacatggtcgccgcgctcaattggctgatattgttcctctacctgtttccaatccagcccatccagcaggccaatatgtataacctcatccgacggtaggtattgggataacagcggcataatatcgctgcgcggtgcctgacctagggttaatgttgccaatgacgcattcatagcgcggcttcgccatgttcgggatggcgttgttgtagatgtatcaaagagccataaagtgcaataagccgtgcatattcggattcgtcataaaactgacaggttccacggccaaactctttcgctacttctacggcaaattttaccgcgagcgcgatatctgtctcatggctggcaccggttccacagccgggtactaccgactgagtacaaatggcgacgccaaccaccggcgctgaagtggccgttgagggctgcataatactgtttaggtgatgcacaccgttaccataaggagtgatatctggaatagtaatagggaatgtaacggcatggcttccgctggtcatctccataatacgcagcaaatcttcggcaacgcgcaggatataaccttgcttaactgtaggggataacgcatagcctttataattgatgatgcgattacctttagtggtatcaatcgataaaatcgcatcggcttccagcatcacctcgttatcattcatggtgatgtcatcaataggggaatccataaaatcgacgggatcgtgtggccgagttggcgcattggggcaaatgtgagtggttatcaccacatcaccggccaaaatatcgcctttactacgcatttccgccagtttaagcgcgctggcaatggctgcaatggcaccgtcagcatcagaaaccacaccaatgcgttcaggccgcgcaccaataccgcccaaacggccgataatgcccagcgttggcgccgtgccacccagtgttttacccgcacttcccgcaatctctattcgtacaaaatccgtgctgccttttggcccagtggcgcggaccgtgctggccttaactcctgaataatcaacaaacagttccacgatatcctgaccagaaacatgggcactatcaatcatttcaaaaacgcgtaatgtttgttgcaagctcatcaggactatccttcatcattaggtctcagcaggcagcggcatagctatttgcccttactggataaaatggagctaaagaagttgtacaatgcgtcgccggcaataaaacctgccgccataatttgcattggtgtacgccccttttcaccccaacatttagtaatcaaaatgcgcaaagcaattcctagcaccacagcccaaccggctagcgcgttattgatcagtaatcccgtcgccagcagtatcccaagttgacgttttgggccgccaatcaactgaataattgcgcctggaatagcccaaatcatcaggctaaacgcaatgcctggctgcgcaccggcctcaatggttttggcataaacgcgcgccatcggcggcactaaatcctgtgcgaaataccccatatgagtgaaccacaccaccggaatggcgataacaaaagcaatcagcgccgcaaataactggattttccgccctatcagctcctgcttcagatctttaccgtatcctcgcagaataaatccggctttcagatcaaagcccatatcagcaaaagcaggcccagttgcagctgtaaaaccggttaagatgcataatgccaacggcggaaagccgatcaaaataccgacgatcagtgtgatcaaagcaacggcaaaagctgggaaccaaccggagtgcatagctgcaatgccaacgatcagttcgtgaataaaagcggcaaaagcggcataaaaaataaaaccgatcaacatgccggtagacatatcgctgtaaagcccaccagccagcgccagcaaggccgcaatcacgacataacccacggcacctataccgagcgctttacgaacctccgttgccggttgggtatagttctttttatccgatactttcttgctacgaatcacctggatgacctgaatcagagccacaaatcctgctccgaccatcactccgtggggaatataattggcattaatatcaaatccgataagcggttcaatataggcacgaatcaataatcccacgccaaacatgcttaatgcccaaatattaccgataaaggcggtgccaaaagcggccatcggaattttgaatatggccccgacgacgccaattcccacgccgacgaccaacagccaggcatgacggccccctttgtcaccggctttaatcgcttctgctgctgcaacgcccggcggccaggcattctctgctggaaaaattttggtatcgaataatcgatagagtaaataggcatccagtaacatcgcggcggcgacgccacaaaacatcggtaaaattagctctggctgccccataacataaggaacagcaataggcatcaacagactatttgcagcaccaaaggttgccgacgaaataacagtttgtgccaggttttgtgtatgaatggatcgatagcgttgaaaaaactttagagggatacgagccaataacatggcaaataatgcaccaatgattgaagtattgggtgtcacccctaaagttgtaatcaattggacgccaataattgcgccaatactagaaagaaatatcatcactaccagcgtgccgatatcccttagttgattccctgatgtttgctccatttttatctccctgagttccgctggtgttagcgctagctatcaaataacacgataatattagttccctggtgaggcgctaattaggttattattaatggccaaactcctatcaatggagtttatttggctcacaggtcttcccatggagaaataaagcaaataaaaaatattttttaaataaagttaaaatttgcaaatcttagctagctataaattattatttttcaaccagtaatcatcatttaatttctcagctaataatctggttgtagaaattaatgcttcaacatattcactggggtaaaacgggggttcatccgaactcggaaaagacaaacatagcccaatcgtttcactgcgatgcttattgctgatattggtcgctattgagctaacgccttgtaaagtctcattacgagcaaaagtccagccgacctggcgcgccgttgccaacttatctaataatgctgccagattctgcggagcattggcagagcgtggtttataagagccaaaatgttcacgaacctcatcgtcactctggcgagccaaaatagcccgacccactgaggtttccgcggcaggagaacgggtaccaaccggcgtaaccaccggtaaaaattgttgcccctgaaacattcgcaaaaccataatttcctgcccatccaacgcagaaatataaccggtgcagcgcgttatttgactcaatttaatcatcattgaagccgccatatcgactaaaggcgtagagagatattggctggatattgataataataaacgaccaatatgatacaaccgcgtatccggatctcgctctaataaaccttccgattccatcgtcattaataaacgtgacgtcgtactttttgccaatcctaattggttaataacatcgctaaaggaaatacccggatgagcatgcatgacgttttgtttggaaaataactttagtactgccgaagcattttctaatgtgctcattttaaatgagttccaatatatgaaactaagttcccgattgaatgaaataaaactagaatccttctgtcatatcgtcaagttttttatttaatttaaaatacaataattagctaacacacatactttataatgaaaaattgaaatttttatcgaagtaaaacgaaaaaatacaagtttaattctcattaattaattagtggcaggataaagctctgataactacaaagatgtaattactcaaaattatgaaaataatgctctgatatttaattacctgtagaaactaaataacgcctctcttacagagtctttgctgaaaatatgggctttgctgaaaatattgactgaaaccctgttcacattttcagtacaaccgaaagtcaggcggataagttagagattacgtaagatataaacggccagtgaagcttcaaatacaatgatggagatcgaccagaaagccggcatgaagttacggtgttgacggagataaagcttgatatgtctcatcagcctcgccttaattggcatccgatgcaggtaaacagaggatttacactgaaattattacgtgggatataattgtactcttgctatacaattcagacaataatgacgagaaaagtcacgacaaaaacatgccactcccctgactgacgactctagtgaggaaacaccgttgatagaaatgaaaaacggcgataaatcgccgttttaactcagattttcacctgtagtaaattatttcaccgtggcatcagccaataattccagaatttgttgtaccactgactgtggggcctgactggcattaagaacataatgggcaacctcttgatacatcgcctcccgaacagccagcacatcctgtatttcttcagcaataggtttaccagtcaaactcggccgctgcgcgtcttcaggctcctcggctaatctttcggccagaatatccgccggcgcacgcaggtaaatcactatcccctgacgacgcataaatgcccgattctctgccgcgagtaccgcgccgcctccggtagccaccacggttttaggtacggtaacttcctgtaataccaaactttcccgcagcctgaaccctttccaaccctctttggctaccacttctgccaccgtgagctggctgctttgctgcataaataaatctgtgtcgataaattgatatcccaacgcctgcgccaacgctttccctatcgttgttttacccgcaccgcgtgcacctaccataaagatagttcgagtcattgcctgatcgtccttttgcatcaaattctctggataaggtttatgcattaaaaaaccggtcaccaccatggaccggttccacagaaagtaaacatttgctggcttatcgacagccaaagcgaatcatacctgtaattaggagtagtgcaaactttacgaaaccgtaaattatacgatacaccctatttccaattacccctcaataacctgaggggcattttgtatcaaaaatctacgctggctctcaacacaaactgccgaggctcgcctatcgccacgcgataacggttaccgctggaaggatagtaggttgtatcgaacagatttttcacattaagttgccatttcactcggtaatcctgaattggcaaggtgtaagcgataaaggcatcggctacggtatagtcgtccagagtaaagctgtttgctgcatctcccgcccgctttccgacataacgcacacctgcgccaacccgtaagtcgtccccaccatacagtccggtcgaacccatttctttggtcaggaacaaggaagcgctgttgcgtgccacgttcgccatctgattgcctttatttttcggatcttccgtcacccgcgcatcggtgtaggcgtaggtagcaacggcgctgacgctatcggtcaattgccccgccacgtccagctctacgccctgcgagcgaacgcgacctgcggttcgggtcacagtttcagtgccgataagctcattcaccatgacattacgtttggcaatatcaaacagtgccagagttccggtcactccgttgaccatttcgaccttgctacccacttcccaggattgtccttgctccggcggcaattcaccgatctgggtcgcaatggatgagttgggtttgaaggattcgctgtaactaccgtacaaagacacttctggtgtcagcttgtacaccacgccagtgcgtggaatcaatttgctatccgaactctgtgtattgatgataaacggacgccctttgccagcaaaaacgtcaaagctgtcataacgcagcccggctaacaaaatccatttatcacccaattcaatagaatcctgcgcaaaccagccataacttttaagattttcacgctgatcgctgtctttagcactcacctgcgtagaaggctgcatcaagccgtaaatcggatcgtaaatattaaaatcggagtttttcttaccgcgaatcatatcgctgcgataggtacggttatcttcataatcaaacccgaccaatacttgatgactcacgcttccccaaatcaaatctccgttcaaagttgcctgcaccgcttgtgcacggcttactgcgctggcggtggcgtcagcctgacgggttagtacgccggtattttcattcagagacagtgcccgagcctgattatcgctatagcgattgcggttataagcataggtcagggagcctttccagctatcattcaacacctgatctatctgtagcgtaatattgtcctgatcgccgcgcgtagcgttaaaaggctcgtcgaaacggcgtttacgtggcgtatcgaccggtttgcctgtgcgtgagtcaataattgtgccgcgatcgaaaggcgtgaggtattccatatgttcgtaggccaaacgcacggttgtcgtttcgccataccacatcagtgacggggcgataaccgtttgacgattacggccaaagttacgccaataatcggtttcatcgtgatcgacaatcatacggtaagcaaaaccggattgccccagcgggccggtcacatctaactgaccgccaccaccgttaaaactgctgccccaaccttctacatgagtacgctgcgccagctgcggtttcttggtgataacgttgatgacgccacccggctctcccatgccatacaacattgaggcgggccctttcaacacatctacccgctcggtagtcggagtgaaattacgagcctgcgccgaccgtacgccatcccgtaaaatcgatccgtcgcggttatcgccaaagccgcgtttcatcagcgcatcctgcgtaccgcccaacgtattggactgagtgataccactgacgttatataacgcttcatcaatatttctcaccgcctgatcgcgcaatacctgcggagcgaccacattgacagcctgcggaacattcaacaagttggttgaggttcgcgttccggtcgttgatgtggtgggctgatagctgtcggaatcttcttcgctaagctggccaatcaccaccattttggttttttcactgtgcggcgcagtttcagcttgagcggctggcatcgccaccagcaaaggcagaccgagccaaggcaagcgacgaatatcactgattttcattgttgaggttactccaataagtccctgaaaaagttaacggcaaaaattgttcatataattgttggaatgttttttgtgggtcgatatcggcaaaaagatcggggtaaaacgctttggcaaacatctccaccgccacaacgtggtaagggctgagataaaagttgtgccacatgctgtaggcacggtgctgctgaacggcattcaagtgagaaatgatgggctgcccggccattaattgctgaaaactgtgttgagcctgactggcgctcaccatcggccctaattgcaggctggaaagacgcttacccgttgggccagccataccggttgcaatataaacgtctgggttggccatcagaatggtttcaggattcagctcgccatagacagttttaattcgcgagcgagcaatattgtccccaccagcgaaatcaattaaatcgcccaagctaccgcgggaagcggtggtacagcagctttctctacgccccagatgcaactgaagcatcaccgtgggcttcggcccctgatgttgtgccagccgttgttggataacctgcatatgttgctgataaaaagtgatgaactgctcggctctagcctgacggttcagtaactcccccaataatcggatgctgggaaccgtgttattcagcatatcgacgcgtaaatcgacgtacaccaccggaataccggctttcgataatccgctaagcatgacttcttcatcggcatcatttttggcatagcgcggcaacaccaccacgtcgggatgaagctctatgattttctcgacatttatctgacggatattcccctgcgcgataattgggactttttcaatatcagggaatttctcaacgtactgctgccaactttgagcatcgtaataggctaaatcccccggccagccgataattcgctgagccggattgccctcttcaagtaacgctaaggtatagagcattcggctctcgcctaagatgatgcgctggggattctcaggtactacaacctgacgccccataatatccttgagtttttttgcctgagcgttaaatgacattaataacaggcaggttattaatattcttgaaattattcccatgatgtttcactaaaaacaaacaatcgcgcatgataatagttctcacttgcattttcaaattatttgaaattaataaaacgcaaaaagaggaatgcacggtgaagcattcctctaaactattttatatttctgtttgaccatttatctgtattccatactgcaccacctttgattaacaaggttcgcgcggctggcagatataaaccaaggcgggagggaaatttcggactacgcgcattttcttccaggtaaaatagcgagataacaaaggctcggacaaatgactatattgaaacagtatcaatgagccattgcgttgccgtaatctttgttgagtttgctgcaatattttcatgctgattttggttggaatagacagtaaaggcaggcaacagaaaatggcgtcgtaatgtaaatccaacagctctgccgaacgcgccgcaacctgtaaacgcggatcgtcaattttatttaattcatcaataaagtgagattgaatttcataggcctgtagcctggcatccttttccattcgcgataaaatccgacgggtcaaaacaccatccgcagcccctaattccgcgattgtcatcgccggcatccactcaacctgatttagcatggtttggcacagccaaggagatgaaggcgccaaagtgccaacagtacgcggagaggcaataaaccgctgaatatatgagaactgacttttaaaattacgtcgcacggtgtttaacatagcctgtcccattaagtccggatagaccaccataacaccttaaaaacctgaatatctctttaagattgttctaagagtcaggtatttttttcgtaaaaaaaatagcctattaccgtcatacaaagcgcttccctcctggttaaaatattattcggctaatcttagataataaaaattggcaaataaaaagagccccaattggaagctacagcctgctagagctataactttcaatcagaacccttacgccctcagcgaaatttgagggatattttaagcgctaggaatttattgattagcgataaatttcagcactggccgtatagtaacttgaatcacctggggaactgatgccaatgacacgatagtggctggcgccgtcagcaacggccttggcattcaatgcggcctcaacatcgcttggtgagccgctgatgccggatacggaaactacgcccattgcctgcaattggctcgcctgttcgcgattaacttcttgggctgccaggcttgaaaaagaagcgctggcgataaacgctgcggtaataaaggttaatagtttcattttagctccaactttctgattattctcagtgttcagtgagattaattatgcgaagaataacgaaagcggacgtaatgctgagtaaataaactcaatcattgtggggaaactaaggaggaattgagttaagttatttcgccaaaggaatggctaataacggtagctatatagccaactttgccctctaataaaacaacctttggggttggcttaaatcaaagggtaaacagcgtcagcgaatgattgtatacatgcacagaaatgcaattggcgattttgctgccattaccgaacgtcatgaatagagggaaaaatggtaatattaagagagttggcttcagaagaactggatgcctaccgacatttctttattggggagtacgctgaagatctgagcgctaattgcggctacagtcaggataaagcacgacatcaagctcacttatccttcgttcaatcgctaccagacggtattaatacgataggaaataaaatttaccgcattgaaaataactataggctagtgggttatctttggtacggattaaatgacggcggcgcttcggtttatattaaggatttttgcatattgcctgaatttcagcggcaaggatttggaaaagccagcctgcaagctttagaagcagaactcgtcactcagggaatttttgaaattaagctacgggtagcggcagataacccacgagccaaaaaactgtatgaacaattagaattcaccgttaccggattcaatatggttaaaacactaaacaaaccatagcttgttgttcaccctggcaacggctcatcataaaataattgctcttcactgcgaggcaaagacgccagtagctttgaagctatttttagcaatacctatcatactgactcgatacagtctgaacgctgggagtggttaagccaggactgatttcatgcaggcaggattaactgcatgaaatatgatggtcgttattcaccatccaaatgctgtaattgatttcgataagattttactttttggcgcttcttaaaccagatggtaaatgacaccacaaaaataccgccagccagcgtcaaaacgcccatttcttgctgataaaacagcatgataataaaataaacggcagaaataattgcaatccacttcgccgtatgaccaacagagtttttttcattagtcagacggcggatatgctcttcctcgctaattcccatcatttattccctctgtgagtgaacttataatattgggccagacgtatgataatacaacataattttctgttttaattttcatcgctcaggaagaatctgattgacctttttcaatcaaaagagtttacgagaatgcgccttcagttatcgccgctagattccatcctgaaattttctggacttgaagctttgctgcttttccagctcaaagatagctcgctgcaaccccttttcctgcattggagacagtttgggaaatttaaaactcaggcgcgtcattgtgacggtttcgcctttgttactaatcacttttttatctactgcacgtatgaattgcaggtccagatcaaaagagccaaactcaccgagatccaataaagagccgcgaagaatctcacacccttccaacggcaactcactgtctttattggaaaacatgcctacaccgcccaaagagatatccgtgagtgtgtgcttaaaagcggtgccattaggaaacttgccagtacaataaaaaggtggccattgtgggatgttgattcgaaaatattcgcgccgttgaataaagtacaaagaatcgggaattgggctgctaaacgcgggtagaccgaaataggtgatctctgtttgtgtggtgcaggagaattcaattttggcaccagcaggttcggcaataaaagttagctgttcggaatcctgtgctaacagattttcacgttcaacgctgccaaaatcaaaaatgaattgattagcatctggatgaacttccaaaatgcggctgataaattgcccacgggagtgcgtcaccattatagcggtattattttttttcagatcccgcaaaattgcgcaaatagctaatcgattctttttaacatactgttctttcgatatctcactcacctgccgatccccaccaagaatttttgattgaattaccctagagaacaccgcaaagagtataaccgtcaatcaaattatcggcagaagttaggaaacatttattgactcttatccgatatggcacaaatttctgcaattggctgcaaatgaaaacgggcacctgaataagtgcccgcttgatactatttcaatccgctagctacgaattaaatcatcgccgtaacctatccacttataggtggtcagagcttctaaccccataggccctcgggcatgcagtttctgcgtactgacggcaacctcagcccccagaccaaactgcccgccgtcggtgaaacgagtgctggcattaacgtaaacggctgaggaatccacttcccggacaaaatgctctgcactgctgagcaaacgggtaagaatagcgtctgaatggcgggttccgtgctggcgaatatgctcaatcgcggcgtcaatatccgccaccacgtgtacattcagatccagagcgagccactcatcgtcataattcgcctcttctaccggaacgaccttcgcaggcccggccagcaaatacggcatcgcttgctcgctggcatgcaaagtgacacccgcactttccattttgctgcttaacgcggctaaaaaggcggcggcgatatcccgatgaaccaacagagtttccagtgagttacaggcgctaggacgttgcgccttcgcattttcaatcaccgtcaatgctttggcaaaatcaacgtcggcatccacaaaggtatggcagaccccaatacctccggtgatcaccggaatagtagattgctcacgacacaatttatgcaggccagcgccgcctcgcggaatcaacatatcgacgtagcgatccaaacgcagtaaagcattcaccagtgcgcgatccgggctttcaatcgcctgtaccgccgccgccggtaaaccgctttgttccagcgctcgctgaatcactttaaccatcgcctgattggtatgatgcgtttccttaccgccgcgcaggatcaccgcattaccggttttcagacacaggctggcaacgtcgatagtgacgttgggacgagcttcataaatcacgccaattacgcctaatggcacccggcgacgctctagcttcaggccgctatccagcaaccggccatccataatctgccctaccggatcgcttagacggcaaacatcgcgcacatcgttagcgatcgcagctaaacgcgcaggcgtaagtagcaaacgatcgagcaaagcttcgctcattccgctggcgcgcgctgcagccatatcttgctcatttgcctgaaggatttcgtcgctttccgtctccagcaacgccgccattgccatcagggctttatttttttgcgcagtactcaatacgcccaattgccaagaggcctgtttagccgcttttcccatctcttccagcatgctagctccttagctgataatcataaactgatgatcatatcgtcacggtgaacagcgaccgggccgtattcatacccgagtatttcactgatttgctgagaatgatgtcccgccaacatacgcaatgcatcgctgttataacgtgagacaccgtgagccagatcgcggccgctcaggttacgaatacggatcacttccccgcgggagaaatcccctttcacgctacggatacctttcggcaatagcgagctgccccgcgccataatggcggctaccgcgccatcgtccacggtaatttcaccggctggcggcgcaccaaagatccagcgtttacggttttccagcggcgtttctaatgcatggaaacgcgtgcccaccggcgtgccgtcaatcacatctcggataacatcaggttgagcacccgcggcaataatcacgtcgatacccgctcggcacgcgacgtctgcggcctgtagcttggtcgccatcccgccggttcccaaacctgaaacgctatcaccggcgatttcacgcagcgcgtcatcaatgccatgaacgtcccgaatcaactctgcggcagggttattgcgcggatcggcggtatataacccagcctgatcggtcagcagcaataatttatccgcaccggccagaatagccgccagcgccgagagattgtcgttatcgcccactttgatttcagccgtagcgacggcgtcgttttcattaataaccggaacaatgcggttatccagcaaagcattcatggtatcgcgggcgtttaagaaccgttcgcggtcttccagatcggcgcgagtaagcaacatctgcccgacgtggatgccataaatagagaacaactgctcccatagctgaatcagacggctctggccgaccgcagccagcaattgcttcgatgcaatggtcgctggcaattcaggataacccaggtgctcacgcccggcggcaatcgcgccggaggtaacgataacaatgcgatgaccttttgcgtgttgctgggcgcactggcgcaccaattcaacaatatgggcacggttaagacggcgagagccgccggtcagcacgctggtgcccaatttcacaaccaaagtctggctgccactcataatttttctgccattgggatcaataaaaaggaatgatacagcagactttgtagcaggagacaggcgttatgccaacaggcataacgcgaaatcaccgctttattgagcagaaaggggtttatgcagagagtttgatgggctgttcgccgaaatcctttgccggttctagcgtcagatccatcgtcttcagcatttcatggaggcgtttatggaaaccacggagcgtagtttccaatttttcctgaacctcaggatctttgattttttgttctttccaacttccctcggtattaaacaagccgagttggtatacataagtaaaacagctgtctttcgactccagctctatccaccacccccagaactcacgtttttcgggagcaagtttcacattgacgcacacggctagacaatcaaagaaaaagcggtcgttctggcactgcccttcacgtagatatggccctaaagctgcaaaacgtttcatcagtttgcttttcgggtgagcgctggatatcgtcatgcttcaatctccttaagtagacgcacacctttttagcaaactgttaaattttagcaactaattaacgcattttatcttttagccaatcgcaagtttgcaacagagctctatgaaaactgtcatacagcggcgttgaagggatgcttaacagcttgccgtcaacggaagaggacacgatcagtttcgcatcttctttcggactaaaaggatcgttttcccaatatccggccagcattggcgtatggcaacgccgtcccaacaacccttgggttttgagagaaaaacggttcagctcagtttttaacgtatcatccgatgcatccgccatacctaaccggctggccagcacatccatatacatatccggcacccgactctggctgttactgtcgcaaagcaggtgatggacgatagggcctacgcaggccacgccgcgtaaacgctgcggctccaaatagcccaaacgcactgcgacgttggcaccgaaacggaaaccaaatagcgaaacacgctgatgatcgacccagggaatcgtcggcaaagcctgtagcacctgctgatgcagatagctggtgtcctgcgttaatttccagcgcgaagatgagccgacggaaggcatgtcgatagtcaacatcgcgatacccgccggtgcaagataatcgcggaagagacggtggtaatcgctctgcaacatatccaggccaccacacatcagcaccgttgggaaaggcgcactgccaattgtcggcatatgcagaaagccggtcagcgttccgccatcctgaatggggaaactcagctcttttaaagtgaaaggcagatattttgccgcttcttcataggctcgattagacaaaatttccgcctgctcggccaattcatcaccacgcaaatgaggataaccggcgatgctgtacatgttggctgcattcagccaatactgcccggcggccagaggatcggtttcttccatggctttttgctgccacatcatgccctggtgagaccactcgtaaatccagttgccgttgcggtaacccaccacggtatccagtaattcattatcactgtgttctgcattagacatcgcaatccgcgccagcacctcttcgatttccagaggatccactccgcgccaggtccacatcaagcgattgatcatacgataccaatgacaggtagtatcgccgtccaatgcggagtgaatattcatggtttggttgcaatgagcatgcctgaccaaagtcgaggtctcaggatgcttgaacttgggtttaaacaggatttcagaaaggttggcttgtgccatggttacaatagcctccataagccgcgatcccgccttggtttaggctggggaatatggggttagtgtactcataccgaggaagaaatgaaacgtccgacagcgtcggacgtttaaagctgcgtaaattatttgccgcctagcggttccacgaaggtcacagccatatcccacggctgctcaatccatgtatcctgaggaatatcaaccacatagtcatcaaccaaaggacgacctgccggtttagcgaaaatagtcacaaagtgcgctttcggatacatttcgcgaatggctttcgcagtaccgccggtatcgaccagatcgtcaatcacaatgaagccttcgccatcgccttcggcacgtttgagcacggtcagctcacgctggttattgtggtcgtagctggagatgcacacagtatcaacatgacgaatacccaattcgcgcgccagaattgcaccgggaaccagtccaccgcggctaaccgcgatgatgcctttccactgttccgcaggaagtaaacgctgtgccagcttgcgggcttgtatttgcaacatatcccaagttacgacgtatttttcgctcataaaatgtagtcccagccgtattaaagtggcttgtcatgtatcgaaggggaaaaaaggttgcgcgagattatagtgaggcaacaagataaaaaccagcaattatcccggtaattccgcgaatcgaatgcggtatttgtgcggccaaacgcgcgcaacgcaaatgaaagtgatattctcgataaatcgcgccatagcaatggcggttagtccttaaccctaaaacctacagtatctcagacgcctccgcattaatctggtgtctgtatgagcatgctgttaaaggagacttacagtgtctgaactgtctaaactttcgcctcagccgttgtgggatattttcgctaaaatttgttctatccctcacccttcttatcacgaagaagaattggcgcaatacattgttgcctgggcaaaagaaaaaggtttacacgccgaacgcgatcaagtgggtaatatcctgctgcgcaaaccggcgaccaaaggcatggaaaaccgtaaacctgtggcgctgcaagcccacttggatatggttccgcaaaagaacaatgacactgttcacgatttcactaaagacccgattcagccttatatcgacggcgaatgggtgaaagctcgcggcaccacgctgggcgcagataatggcattggtatggcttccgcgctggcggtactgtctgacgacagcgtagaacacggcccactggaagttctgctgaccatgaccgaagaagccggtatggacggtgcttttggcctgcaaccaaactggctgaacgctgacattctgattaataccgattccgagcaggaaggcgaaatctacatgggttgcgccggcggcattgatttcatcaccactttaccgttacagcgtgaggcggttcccgcaggctatcaaacgctgaaactgatcgtcaaaggtctaaaaggcggtcattccggcgcagatattcatttaggtttgggaaatgccaacaagctgctggctcgtttcctatttgaacatgaagcggagctcggcctacgggttctggatctgaacggtggtacgctacgcaacgcgattccgcgcgaaggtttcgctattttggcggttgcagccgataaagtagatcatttgaaaaccctgactcaggactatttagacatcctgaaaaacgagctatctgcggtagaaaaaaatctcaccgtggtgctggaacccgtcagtagcgcagcgaaagctttgaccgctgatacccagcaccgtctgctggcattgctgaatgcgacgccaaacggcgtaatccgtatgagtgatgaagtgaaaggcgtggttgaaacctcactgaacgtgggcgtcgtgaccatggaagaagataaggccgaaattatgtgcctgattcgttccctgatcgacagcggcaaagactatgttgttagcatgctaaccgccgttggccaactggctggcgcgcagactacgcctaaaggcggctatcctggctggcagcctgacgcaaactctccggtcatgcatttagttcgcgaaacctatgagaaactgtttaacaaaacgccaaatatcatggtaatccacgccggtctggaatgtggtttgttcaaaaaaccttacccagaaatggatatggtttccatcggcccaaccatgacaggcccacattctccggatgaacaagtacatatcgaaagcgttggtcaatactggcaattactgaccgcattgctgaaagccattccaaaacgcgcttaagcgagtaccgcactatcattacgaacggcgccgcctgcggtagcgccgttttttatggcaaatttgctgctagaaaacccagaacctggcatctatcccagcgctattcccaattcagcaataattgccgttcaatctgcggatccagcaggctgacatgcaatcccaccagtcgcacacctctgtccgcccgtcgctcatcccaaacttgcttggcaatacgcaataaatcgaccttgttcaattctggccaaacgtgttcctgagtcgtttgctgaaaatcctgaaatttaagctttacgccctgacgagcaatttgcagatccggcctgaccttagccaagcgggcttccagttcggggaaaagtttttcaataatctcaacgcattcttcccagtgatgaatatcctgcgccagcgtcctttctacgccaacggatttacgcaaccgatcgggagatatacttcgctcatcaataccatggcagcgctcccataatacccgcccaaatttaccaaaggttttcagtaaatcagccaaaggataattttggacatcaacacaatgagttaaacccaattcctgtaaacgcttagccgttacttttcccacgcccggaattttgttaagcggcaaagtttgtagaaaaggttgaatttgatccggtgtaataacgtattgtccgttgggcttattgatatctgaagcgatcttggctaagaatttgatcggggcgattccggcggatgcagttaaacctaattcctcatgaattgactggcggatctgttgagcaattaaggttgctgaaccgctaaaaacctgactttcggagacatccagatacgcttcatccagcgataatggctcgataagcaaagtgtaacgggcaaatatttcgcgaatatgtaaagaagcttctttatatgccgccatacgccccggaatcacttttaaatgcgggcaaagcttcaatgccatcgcagtggacatcgcactatggacaccgtaacgtctggcaggataattggccgtgctgataacgccacgacgatctgcgctaccgccaatggccaaagggatatcgcgtaaactggggtcatcccgcatctctacggctgcaaaaaagcagtccatatcaacatggataatcttgcgcactctcactcccatcggcaatagacaactgtataagtatacagtaaaaaaagccatgttcaagattgtcctaatttaaatgccgctaaatatttctaatttccagatcgaatactgttatttacatttaagcgattttttcatttatttttaataaaaaagtactacattcgataaagtcgtagagtaatgtttttttataaagtaaaacacatgtatagagaaattcaatttaaatgggttatacggggtatatattatgcggaattatattatggcaagtatattaatcttattttcattacaagttatgtcatctccttcagctaatgaaccgccgaaaatagtggcgcaccgggctggtaccggagacgcaccagaaaatacgctccctgcaattaagaaatcgttggaaaatggagctgatgctatttggattaccctacagttaacaaaagatgatgtaccggtactttatcgaccttccgatttaaaagaactaaccaatgtttcaggaaaagtcagagactatacgaacaaacagctatcaacagttaatgctgctaaattctataatgaaaaaaataaaaccgcattttcagccaatattccaacgttagaagaagtcctaaagttgaaatatgtgctggaagattatcctaacgtcatgttctatctagatattaaatccccagatgccgaaaatctggctcagccttttgctcaggctctacaaaaagtgctgaaggaaaccaacagttttgaacgtacccgggtttattcaaccgacaaactgtatctgaacgctatagatcagatgaataaggacgcggggcgaaaagagcaaattcaacgttttgaaagtcgagatgaaactcgtgatgctttggtcgatataaccttaggccatcaatgtaagctgccggtagacaaaaaggagcgctggtacggattggagatgaagcgaaacgttgagttagtcgttgtggaaaaattcactcttggcgaaggccgttctcactcaaacaccgtattaacatgggataaaagcgctatcgattgtttccgctccaaagggaaagcctatattattttctttggtatcaatacagcgcaggattatgaaaaagcaaaagagctaggtgcagatgccgtgatggttaactcaccgaaagaatttaaaaaaatagtgaatgaaaaaaagtaatcgattaaatatatccttgtagacaaaaagcccggcagttaattagccgggccttttatgctataggatacgaaactgatccagtttcttctgccgggccgcttctttttccattcgctttttacgggaatcacaaggctcaggacagtcgcagactttctccatccccagcgtagcaataccgccgcagctcccctgtaaggttttgcgcttcactacatagccaatagacattccgccaataaccagcaggaagaagacgaaagacgcgagaaaaactgtcagcataactcctcctaagatcgattttgcagatagggttcgaaggcttccgaatagcgttcttcaaatcccttatctgttttaacgatcataaataccggtataccaagtagattagccagcgccagccctttttccggccccaacacatccagcccggtagacaaaccatcagcggtcatacagctaggattcagcacggtaatggaaaccaatctatggttgattggccgccccgtcgcgggatcaatggtatgagaatagcgtacgccattttcttcaaaatagttacgataatcaccagaggttgcgagcgacattctccctggttcaataatctcctgcgcactttgatcgacaccagcacccggtttttcgatcgctatacgccagggcttattttcgccattattcccacgggtgcgaacttctccgccaatatcaaccatgaaatttttgatgttctgagattgcagatattccgcaaccacatcaacaccgtagcctttggcgatggaagaaagatcgacgtacagctcaggcactcgcttaattagtgcgttgccttcaacggcgagtttatctattcccacccagccacgacgtttctctaattcttcggcagaaggcactttatcaggacgtccttcagggccaaaaccccataagttaaccaaaggcccgacggtgacgtccagcgcaccgtcggttaaccggttgatacgaatcgcttcctgcaccactttggccgtagcagcggacaccgggaaaggtttattaatttcccgactctgattaaaacggcttaattcagaatctggccggtaagtcgacatctggttattaaccacttccaaaatcctatcgacttctttttgcagttgttccggagaagaccgggacgtatcactcacatattttatcgagtaataggtgcccatggttttaccggtgagattcacctgctcagggccgcagcccgctagcaacagcactcccatcaggagtgccagccaaagtattattttcctatgcacaataatcctattattgtaaaacgcccgtcaggcatgacatcagccaccgaagtcatcaagcataatattgtcgtcctcaacgccaagatccttcagcattttgatcactgctgcgttcatcattggcggaccacacatatagaactcacagtcttccggcgcaggatggtttttcaaataattttccagcaacacattgtgaatgaacccagtgtatcccgtccaattgtcttcaggctgaggatcggacaaagcaacgtgccaggtaaagttttcattctcttcctgtagctggttgaaatcctcttcatagaacatttcgcgtttagatcgagcaccgtaccaaaagctgattttacgcttagaatgcaaacgcttaagctgatcgaaaatatgcgagcgcatcggtgccataccggcaccaccgccaataaacaccatttccgcatcggtatctttcgcaaagaattcaccgaatggcccggaaataaccactttatcacccggcttcaacgaccagatatacgaagacatgatgcccggaggcgcgtccggcatattcggcggcggcgttgcaatacgcacgttcagcataataatgccatgctcttccggatagttcgccatggaataggcgcgcaccgttggctcggtcactacggattcaaaacggaacagattaaacttatcccaatcgccgcgatattcttccggcacgtcaaaatcagcatatttgacggtatgaggttcagcttcaatctgaataaagccacccgcgcggaagggaactacgtccccatcaggaattttaagtttcaactctttaatgaacgtcgctttgttgtcatttgaaatgacttcgcaagtccattttttcacgccgaatatttcttccggcaaatcgattttcaagttttgcttcacgctaacctgacaggccagacggcaaccttctttagcttcacgcttagagatatgagaaagctcggtcggtaaaatatcgccgccgccttctttgatcgtcacccgacactgcccgcacgaaccaccgccaccacatgcggaggagacaaaaatgccgtggccagaaagcacattcagcaatttatcaccggccggtgcagtaaagcttttttccatatcaccgttgatttcaacctgaatatcaccggtattcaccaacttcgatttggcgacaagaatcatcaccgtcaacgctagcacgatgagggtgaacataactacgcctagaattatttccatgagttcttcctgcctttatagatgcacaccggagaaggacataaagcccagtgccatcagcccggtggtgacaaaggtaattcccagccccttcaaaccacccggaacatcggcgtatttcattttttcccgaatacctgccagcgccacaatagccagcatccagccgattcccgaaccaataccgtacacaatggattctgggaagttgtaatcacgctgcgccataaaggacacgccaccaaagatggcgcagttcacggtgatcaacggcaagaagatgcccaatgcgttataaagcgccgggaagtagcgatcgagaatcatctccaacacctgcacaatcgccgcaatcacgccgataaaagtgatgaagttaaggaagctcagatcaactccttccaccagcgctccatcgcgcagcaccaggttataaaccaggttgttggcgggaaccgcaatacccagcactacggttacggcaatgcctagaccgaaggcggtggacactttcttagaaaccgccaggaaagtacacatcccgaggaagaaggctaacgccatgttctctacaaacaccgcgcggacaaacagactgatgtaatgttccaccgtcaattactccttttcaatctgcgcaggtttcagggtacgtaagccccaaatcagcatgccaatgataaagaacgcactaggcgctaacaggaacaatccgttcggctgataccagccgccgttttgtaccgtttccagcacggtgacgccaaacagtttgccagaaccaatcagctcacgaacaaagcccaccagcaccagaatcacgccgtagcccaagccgttaccgataccatccataaagctttcgatcggcggtgacttcatggcgtaggcttccgcgcgccccatgacgatacagttggtaataatcaaaccaacgaataccgaaagctgcttcgaaatctcataggcgtaggcacgcaaaatctgatccaccacaatcaccagagaagcgatgatcaccatctgcacgatgatacgcacgctgttagggatatggttacggatcagcgagataaagaagctggaaaatgccgttaccaaggttaccgccagcgtcattaccagtgcggtttccagtttggtggttaccgccagcgccgagcagaccccgaggatttgtaatgcaatcgggttgttgtcaaacaacgggccgaataaaacccgcttaatctctttgctatcagccattttttaacgctccttcgcgcacttttttcaggaacgggccaaagccgttttcacccaaccaaaaatcaaaggtattctgtaccccgttggaggtcagcgttgcaccggacaaaccgtccacggcgtaaggatcgttcgcatctgcgcgtcctttcactacgcgaatagccggttccccttgttcattgaacaaacgcttaccgacccattggctacgccagattgggttttcaacttcaccacccagccctggggtttcaccctgatcgtaatagctgatgccacgtacggttttcccgtcgttatctaccgcgacgaaggcgtacatcatcgaccataaaccggagccgtagaccggcagcacaattttactggtctggccctcctcattacgcaccagatagatttccaccagattagcccgacgtttaattccggctttatcttgcgcagcggtcagagcgatgctttggctatcatcacgtaaagcctgagaacgatcgaagctggtcggatcggttttaacgaaatcaccgctttgcaaatccaacagacgcggttcaatacgagcggaaaactcttgtttgacctgctctgcatccatttttggctggagtaaaccggccacgtccagaatgttgcgttgcttatccagtaagcgctgttcctgctgtttggatttcaagccaaccgctgcgccggagaccactacggagcacaccagacacagcaagaccactaccatcagcgttttgccgatagtatcgttatttcttggtttatcactcgccacgggctttcctccgcttgatgttggcctgaacaaccacatagtcgaacagtggcgcaaacaggttggcgaacagaatcgccagcatcattccctccggataagccggattcacgacacggattaagacgcacatcacaccgatcagaccgccgtaccaccacttacctttattggtaaaggaagccgataccggatcggtagccataaagatcataccgaaagcaaagccacccaataccagatgccagtaccaaggcatagcaaacagcgggttagtggtagaaccaatccagttgaacaggaaggccgtcgcaatcatgccgatcatcacaccagcaacaatgcgccaagatgccacgcggccaaacataatgatggcaccaccgatcagaatcatcagggtagaaacttcaccaatagagcctggaatgttgcccataaaagcatccatccagctgattggttggccggtgaccatgttcatcagactgtggctgccgttaacgctccactgggacaacggcgttgcgccagagaatccgtcggccgcgttccagaccagatcgccggagatctgtgccggataagcgaagaacaggaaagctcgcccagccagcgccgggttcaggaagttacgtccagtgccgccaaagatttccttaccaatcactacgccaaatgaaatccccagtgccgcctgccagagtggcaaagttggcggaacgatcagggaaaacagaatggaagtaacgaagaaaccttcgttgatttcatgacggcgaataatggcgaacagaacttcccagaagcccccaaccaaaaacaccaccgcataaatcggcacaaaatagaccgcgcccagcgtcatcatgctgatccaactggcatccggtgccagcgaggcgccaagcatctccgccagtcgataatgccagtcggcggcaatcacctgttgcagctccgcgccgctatacaggtggttcagcgcaggaatagcctgctgaccaacgttgtacatcccccagaacatcgctgggaataccgccagccataccaaaatcatcatccgtttcaggtcgatagcgtcacgcacgtgggaggcacccggcgtcactttaccctgagtgtagaaaatactggccgtggcttcgtatagcggataatacttttccagctttccgccggactcaaaatgatgctctattttctcaaaaaaacttttcaggcccatgagttatccttcctgctcaatcttggtcaaaatgtcgcgcagtaccggaccgtattcatatttaccggggcagacaaaagtacagagcgccaaatcttcttcatccagctccaaagcccccagcgcctgagcgctgtcggtatcgccggctaacagatcgcgcagcaaatgcgtcgccagaatatccagcggcatcactcgctcgtagttgccaattggcaccatagaacgttcgccaccgttcaatccagtagaaaaagcaaagcgcttgcgcttgaagaaatggccgagggtggtgcgggtaatagagaatttatctttacccggcataatccagccgaacagctccttgtctcgcccttccagcactacggaaacctgctgatggaaacgaccaagatagccatgtgtcgcagaggccgcggttccgctcagtaccgaaccggagataatacggttatcccctgctttcagtttaccggcggtcagttcggtcaggctggcgcctaaacgcgtgcgcagcaggccaggttcttttacctgcggccccgccagcgcaataactctatcagtgtaaagctcaccttcgacaaacagtttgccaatggcgatcacatcctgataaccaatgtgccagacggttttcgtcatactgaccggttcgaggaagtgaatgtgggtgcccaccaacccagcaggatggggaccggaaaattcgttataggttatttgcccgttattctggccgcgaatgatttccccggcgccgtgacaaacgtgcactttaccttcggttaagcgcgtcaatacgctcaaaccgtggttaaaggcatcaatttgcgtggcaataatggcctgaggatcggcagccagcggttgggtatccatcgccgtgacaaaaatagcgcgtggctttgtgcccggctgcggagttttactgaatggacgagtgcgtagcgcagtccacagacctgaggccagcaaattttgctgaacctgctccgcgctcagctggttgagctcggcggcgtcgtaacgattgaaggaaacgctgtcgtctccctctatttcaatcacgacagattgcagcacacgccgttcaccgcgattaatcgcagaaatcttgcctgctgctggagaggtgaaaaacacgccggggttctttttatcttcaaaaagcgcctggccttttttgaccctctccccttcttgcaccaacattgaaggacgcatgcccacatactcttcaccgagcagtgcaacatgatgaataaccggaccttcctgtatgacctgagccggagccccggcaataggtaggtcgagtcctttttttattttaatcataaggtttgcacgattctgtcaggtgtatcaaatgctgtacgtcatccagaggagcacagcaacgcgatgattagttatttttaacagttcagttaatataatgaggtattaaccggcagcgcaattagcgtgcattttacttgcaggcatttactgatttaaataacaacattaatttctgctaatgtgacagcgttggaagatacaaaaattgcgtttcattgctcaacaaaacaactcaatatctttaacaccaatatgccttcagtagccgaggattttagcattttagcctgttgctgtctgataaaagcagtgacctggctcaagcaaacgacattatattgatcaagaatcgcctctgcactcggtaaaaacgtaaggttaattcgcttttaccgatcacagtttcttttttatacaaatctattattgataaaaatattctgactgataatctgcaaacctatactaacaaaagcagtggctcaccgatcggcagatacgatcggttcccagtaagagaagtaggaataattaatgggcaaaatcgctctgttacttgcgatgatcatttgtttgcctgcggtatccttaaccagctcagccagtgagcccgttgcggttaccaatgcgcttaaacagcaattactcggttctccggtctatatccaaatatttaaagaagagcgaacgttggaattatatgcccgtttacagggcgaatatcgattggtacgaagttatcagatttgtaatttctctggcggtcttggccccaaacgccgcgagggagattttaaaagcccggagggattttacagcatagatacgcgtcatttaaaacccgatagtaagttttatcgggcgatcaatatcggcttcccaaatgactttgataagtctcagggatactcggggaaatatctgatgatccacggtgattgtaaatccattggctgttacgccatgaccgacaattacatggatgagatatttaactacgtgcaaaccgcatttatgaatggccagagcaaagtggatattagtatttatccgttccgtatgaccgagcaaaatatgcagcgccatcgtaactcgtcagatattaacttctggcgtcaattacaaccaggttatgcctactttgcaaaaaatcgtatgccgcctttggtcggtgtcattaacggacaatatgtgattaatcgtccgttaatgtccagtgcgccagcctcagagtacgcgctcaccaaaacagaatagagcaaactcgcctggcgctattttgtgccaggtttcattgccggtcagcggctgagtggcaatgacgctgaccacatcattgggtgtggtttgctgctgaaaatctatctccacatcctgatccagcaaagtggctttaccgaaaggtgcccgacgcgtaatccaataaagattggttgagcaataggccatcacaaaacgcccatccgataacagcatattaaatacgcccttggcgcgcagttgctcagacaatgtcgcaataaagcgaaataccgcaggccagttacccggtgtgcgcggataccgcttggccaattgatttaacagccagcaaaacgcatattcgctgtcagtctggcctatggggcggaaagtgccggtctccaactgacgataccctttcaattgtccgttatgcgcataagtccaattgcgcccccacatttcccgagtaaaaggatgggtattttccaacgccacttcgccacggtttgcctgacgaatatgggaaatcaccgcgcaagacttgatcgggtaatcctggaccaggcgggctatcggggagttaaagctgggttgcgggtctttaaaggtacggcaaccgtgaccttcataaaacgttataccccaaccgtctttatgcggccctgtgccccctccgcgctgaaccagcccggtaaaactgaaacagatatcagtgggcacattcgcgctcatcccgagcaattcgcacatcaccaacctcctctactgcctgtgcagtagcaataaaaagccaaaaccaatcagggcgaagaaaccggaggtaaagcgtgcgataaggaggccatgatagcctccggtgcagagcggtgaacaccccgaggcgcgggaaactccacggcgacctcaggttattccataccagccagttattaggccttaaccatctctttttcaatcagctgaatcaagatatgaatcgctttgatatgtatttcctgaatacgatcggcgtaaccgaaatgaggcacccgaatttcgatatctgcagtacccgccattttaccgccgtctttgccagtcagggtgatcactttcatccctttggctcttgcagcttcgatcgccttaatgatgttgccagaatttcctgaagtggaaatgcccagtaaaacatcaccttcacggcctacggcttccacatagcgggagaaaacatagtcgtaaccaaaatcattactgacgcaagacatatggctgacatcagagatggcgatcgccggatagccagggcggttttcacgatagcggccagttaattcttcggcaaaatgcatagcatcgcaatgggagccgccgttaccgcaggaaagcactttcccaccggctttaaatgagtcagccagcaagatagctgcccgctgaatggcgtcgatattggcatcatcactcaggaaattagccaaagtatcagccgcttcattaagttcacttcgaattaaatcgtggtacatgggagcctctttatatgtcctgtggcatcaataatcttccgcaggcagtgtaccggatagcgcaaactgcgagaagcgccgtgatgaactgttgcaacggcttttgaccttaaatgctacgaatttgtgaaccaagttgtaattgatatgtaatggcattgataaaaacaatgagatgaactaaaaccaatacatcactcaacaggtcagacctcctacaactcaggagcttcattatgatggttcttagcattgttgccttgctggttcttattggtgtgttgttctatcaccgggtgaacctacaccttagtagtctgcttcttctggtatacaccgccgccttgggtgcgctgcaagtatggtcattctgggcgttgcttcctttggtgattgtgttgctgccactgaacttaacgccgctgcgccgctctctgttctcagctcctgcgctgcgtaccttcagtaaaatcatgccagccatgtcacgcaccgaaaaagaagcgatcgatgcgggaaccacctggtgggaaggtgatttattccaaggcaagccagactggaaaaaactacataactatccaaaaccacagctaaccgctgaagaacaagcctttattgatggtccagtggaagaagcctgtcgtttagcaaatgattttcagattacgcatgaactggctgatttgccgccggagctgtgggcctatctgaaagaacaccgcttcttcgccatgatcattaagaaagaatacggcgggctggaattctccgcttatgctcaagcgcgcgtattgcagaagttatccggtgtttccggcattctcgccattaccgtgggcgttcctaactccctcggccccggcgaactgctgcaacattacggcactaccgaacaaaaagatcattatctgccacgattggcgcgcggcgaggaaattccttgcttcgcactgaccagccccgaagcgggttccgacgccggtgcaattccggataccggcaccgtttgtatgggtgaatggcaaggtaagcaagtgttgggtatgcgcctgacctggaacaaacgctatatcacgctggcaccgatcgcgaccgtgctgggtttggcgtttaaactgtccgatccccagcatttactcggtgaaaccgtagatttgggtattacctgcgccctgatcccaactaacactcctggggtagaaatcggtcaccgtcacttcccgctgaacgtgccattccagaatggcccaactcgcggtaacgacatctttgtgccgatcgattacatcattggcgggccaaaaatggccggtcagggctggcgtatgctggttgaatgtctgtccgtcggacgtggtattaccctgccatccaatgcaaccggtagcctgaaaagtgtggcaatgggtattggcgcttacgcctacattcgccgtcagttcaaaatctctatcggtaagatggaagggatcgaagaacctttggcgcgaatcgctggcaacgcctacgtgatggacgccgccgccaccttaatcactagcggtattatgctgggtgaaaaaccggcggtactgtctgccatagtgaaatatcactgtacccacaggggtcagcgcgcagtcatggatgcgatggatattgccgggggtaaaggtatctgtctgggtgaatccaacttcgtcgcccgttcttatcaaggcgcgccgattggtatcaccgttgaaggtgccaacattctgacgcgtagcatgattatcttcggtcagggggctatccgttgccatccgtacgttctggcagaaatggccgcggcacaaagtaacgatgttaacgcttttgatagcgccctgtttggtcaccttggccacgtaggtagcaataaagttcgtagcttctggctgggtctgaccaacggccgtaccagtcatgctccggtaagcgacagcactcgccgctactatcagcagcttaaccgcttaagtgccaacctggcgctgatgtccgatgtttccatgggcgttctgggcggcagcctgaaacgtcgcgagcgtatctctgctcgtttaggagatattctgagccaaatgtatctggctaccgcaacgctgaaacgttatgaggatgaaggccgtcagaaagaagatttaccgctggttcactggggcgtgcaggatgcgctgtatcaggcagaacaagcactggatgacttactgcgaaacttcccgaatcgctttattgctggcgtgatgcgtattggaatcttcccgtttggctgcgtacatcgcgcgccgtcagatcgcttggatcaccaattggctcaattgctgcaagtgccttcggcaacccgttcacgtattgggcgcggtcagtacctgacgccgagtgaattcaacccggtcggcttgctggaagccgcactgcaagacgttatcgccgcagagccaatccacaaacgcctgagtaaagaagccggtaagaatctgccgttcacccgtttggatcagttagccaaacgcgcactggcggaagggaaaatcagcgcggaagaagctaacgtgctgattaaggcagaagccagccgcctgcgctcgattaacgtagatgaatttgaaccggaggcgctggctacccagtccccggtaaagcagccagatcggccacgtcaaacggaagcggcgtaactgatagtactcattgataattcatgtgtctaaaacaaagtcccggtctaatgccgggacttttttatcgctgatttttgatagcgaactagcgctgaacctgaaaatagcgagcagccaagcgctcaattatccgttttgacgaatacgggcaattaattcacccacattatcaatatgcaccgctgccagtattaatgtgcgccccagactcagagcctgacgctgacaggctaaacgcatcccgtcatcttcaatgctgtccaaatccgcgacgtgtgccaacccgatggtgcgcctaatcaattcggttccacagtaccccacggcatcattccacacctgccggaggaaatactcggcataaccagcagttttcaacgcttgatcctgagttttctctgcgcatagcgtcagaaaacgcgtggcaaaagcctgccaaatttcacgaatgtcatctaaacgctgttcacggcctgccgctgcgtctctcggcccggtcaaccccggcaaaccgcagtaatttagcaatacatttcctaaagccgtaccgatatcaaaaccaatcgggccataaaaaccgaattctgcgtcaatagctttcaatttaccttcggccacaaaaatcgagccactatggatatcaccgtgtagcaaagcttccgctttactcaaaaaccgatgtttaagggaagctaccgccagtttcagcccgttgtcctgacgcagcgccagcacctccggcagtaacgcggcgtcaaaattattgcgttcatgatcgtgataaggatcggtaaaaaacagatcttcagtgatctggcacagttcgggattggtataacggatcaccgccgccttcttactttgtgccgactgataaaaatctgaggtgtggaataaagtctgccccagatattcacccaactggctggccgcctgcggataatggcggcctttcaccaattcatgccgccagatgtgatgatcggaaagatcctcctgcaccatcaccgccaactccgcgtcatggtgcagtattttaaccgtgtgttcagggcagaactggctgtgagttagcagggtttccgcttcgatgcgcgctcgatccaaggtcaaaggccaagattctcctacgcaacgaacgtaaggcaatgcctgtttcaccaccacccggcttcgccccgtttcatcacggatcttaaacaccagattcagattgccgtcgccaatttcatccgccgaaaccaacgtgtgcggttcagcaatccggccatattgacgcgcatatgcaacggcatcagcagcagtaaacgtgtgataacctgacatctcccaccccttctcaattctctggtcgcccacggcgcattaattatttaggcgtaaaaacatgtagacgtctatacatctgtaaagcatgttggcagaataagaacccagatgcaataacgcaacatggatttaactgacgatgccgacgcttaacaccaccagcctgaaaatacgcgataaccagctttggattctcgatcagcaagccctgccccaacgccaaatctggcgtttggctgatgacgtagaatctttggtcgaacatattctgacgttacgcgtacgcggtgcgccgctgattggtctctctgccagtctgttactggcgctgctggcggagcgaggtttatctcaggcgcagttggagcaagcgctcatcacgctaagagaatcacggccaacggcagttaacctgatgaataatctggcacggatgcagcaagcgttactgcggccagattgggtaaattccatgatgaaagaggcgctacgtttgctggacgaggatcggattctgtgcgatagcattgccaatcacggcgcagcgttggttaaatccggtagcagacttcttacccactgtaataccggcggcttagccactgtgggcgtgggaacggcaataggcgtaatattacgcgctcatcagcagggaaaaatagataacgtttgggtcgatgaaacccggccattactacaaggtgggcgtttaaccgcgtgggagttgggcgagttgggtattccctatcggttaatttgtgattccatggctgcgaccttaatggctcagggccaggtagactccatttgggtcggcgcagatcgtattgccgctaacggcgacgtagcgaataaaatcggcacctacagcctggcggtactggcacattatcaccatattccgttttatgttgcggcacctcacaccaccgtggatccgcaatgtccaaacggagccgccattcctatcgaacagcgcgcaactagcgaagtcaccggcgtatccggcagctttggcgaatgtcactgggcacctcaagacgcgcaggtgtataacccggcctttgacgtcacgccggcaaccctgatcagcggttgggttctggacagcggcgtaatcacgccacagcaggttcaggccggatttttccagcctgaataatgtaaatgcacaagcgaccttactgagccgcctgcatttacattaatctaaacgaggataagcatcggctatcttatcgccggtaaaatgcgccacccaaccttccgggttatcaaatacccgaatagcggtgaaattcggtgccgatcccatatcaaaccagtgacgtgtatccgccggaacggaaatcaaatcgtttttttcgcagagaatctgaaagattttcccctctaaatgcagacaaaacagccccgcgccttcgacaaagaaacgcacttcgtcttcgccgtgagtatgttcggataaaaacttctgtcgcagagtttctcgctgagcgttatccggacgcatactgatcacatcccaactttgatagcctttttctgccaccagccggtctatttcatgttgatacgccgcaattactgcttccggcgacggatttccccccaacgcccgatccgcacgccaacgctcaaaacgcacgccaatacttgccaactgcttctgaatagccgttgcatcagtgctttgccagataggctgttccggctgctcatcgctgaaaatagtcaaggcactcatgatgcaaactcctctaaaacgatctgatcgaaacagttaacctgccgatgatggctttctgcatccggcaaatcgcgaatcagctggcaagtctgccaaccagcctgctgagcggcgtccagctcctgacgaatatcggataaaaacaggatatcgtgcggtgcaacggctaagtgctcagtaatattctgataagcggagacttcgcgcttcgcgccaacgcgagtatcaaaatacccgctgaataacggctgtaaatctcccgcatcactatagccaaacagcagttgttgcgcctcaactgaaccagaggaataaacatatagctttaccccttgatgctgccaattagccagctgcggagccacgtccgggtaaaggtgaccgcgaaaatctccgttttgataaccagtacgccagataatgccttgcagagcttttagcgcggtagacttacgatcctcatccataaaaccgaatagtacgctaataagggtttctatatccgcatccggctgaccaatttcacggcgtaaatctgccagcagaacggtcacgtcttcttcgctggcgtgctgacgcaaaaaatccgctaatcgggcgcgagcgtaaggaaaaagtacctgatgcacaaagcgaatatcgctggtcgtaccttcaatatcagtaacaatagcctgaatcatttgacctccagcaggcggcgttgtaattcgcactggaacaggaattctaatccttccagatgacggcgcgcttctgccactgagttcccccagcaataaagcccgtgacctcgtaccagaaaaccgtagcgtaacggtgccaacgctgcgcggcctgccactcgctcagccaatgcgctaatatcctgatcgttatcaaaaataggaataaccacggtatccaaatgggatttctgacccgacagggacttctgcatttcataaccctgtaaaaccaatccatcacttttttccacgcgagaaagtaccgtggcgttcaccgaatgagtgtgtaaaaccacgctaacatcaggatataaccgatacagcaaagtatgcaggccggtttccgccgaaggcgtacgcccgctgggcacgtgattggtggcaatatctacgctcaggaaatctttcgccgtgaggcgacctttatctttgccagattcactgaccaacgcgtattcactgtcggcacgcagtgacatattaccgccagtcgccggacaccagcctttgccgccaatccagtggcaggccgcaagtaacgcctcaagttgtgtctgttttgccatttccctacctctgcaattgttattttcgccgtgcaacaggggaatattccacgctgcccccctatgagctgacattaacacaaaaaatcatttagccgtttaaacatctaagcgtcttgattgccaaatcttaacatcgtgttatattgacagcaacatcagcgccaggagtttcagcccagaatgagcactttatcattgattccagacagtaaattacctgcccaaggcaccaccatctttacgcaaatgagtgcgctggcgcaccagcatcaggcaatcaatctgtctcagggattccctgattttgctggcccggaatatctaaagcagcgtctggcttatcatgttaatcagggagcgaatcaatatgctccaatgactggcgttgcagcgctgcgagaagcaattgcagataaaaccgccgccgtttacggctggcgtcctcatgctgatagtgaagtgacggtgaccaccggtgccagcgaagcgctgtttgctgctattaccgctctggtgcgcaccggcgatgaagttatttgctttgatcccagctacgacagctatgcgccagccattaaactggcgggtggcgaagtcaaacgcatcgccctgcagcctccggcgttcaatactcactgggctgaattctccgatttgctgaccgaacgcacgcggttggtgatcgttaacactccgcacaatccgtcagcaaccctatggcgcgcggctgattttgagcaattatggcaagccattgccgatcgcaatatttacgtcattagcgatgaagtatatgaacatatttgtttcgccgctgaaggccacgctagcgtgctggctcaccctcaattgcgtcagcgggccgttgccgtatcttcattcggtaaaacctttcacatgaccggttggaaagtcggttattgcatagcgcccgccgccatcagcgcggaagtgcgtaagatccaccaatacctgaccttttccgtttgtacgccaattcaattggccctggccgatatgctgaacgccgagcctgagcactggcagcaactgcccgatttctaccgcgctcgtcgggatcgcttcgtacaggcgctggccgccagccgcctcaaaatattacccagtgaaggaacctacttcctactggtcgattacagcgccgtttccgatttgaacgacgtagatttttgcctgtggctgacggaaaaaatcggcgttgcggctattccgttgtcagtattctgtgaggctccttttcctcatcaattgattcggctgtgcttcgctaagcaggaagccacgctggacgccgcagcggagcgcctatgtcaactttaaaactgactctactacaacaaccgttagtctggctggatgccgaagcgaatttacgccattttgcgaagctgctcgaagatatccaccagcgagatgtcattattctgccggagatgtttgtcagcggcttcgccatgaacgccgccgagttcgcgctaccggaggcggaaatcctcgattggctccgccattgggcagggaaaaccaatgcattactcggtggaagcgtagcgctgcaaacgccagaaggcgcggtgaaccgctttctgctggttaaacccagtggcgaaatacatttttatgataagcgccatctgttccgcattgccggtgagcaccatcattatcaggctggaaaacgacgtaaagtggtggagtggcgtggctggcgtattttgccgcagatctgctacgacctgcgcttccccgtctggtcgcgtaaccagcaagactatgatttagcaatttatgttgccaactggccagcagcgcgagccaaacattggcaaaagctattgcctgccagagccattgaaaatcaggtatttgtcgcaggatgtaatcgggtaggtgaagatgataacggccatagttatcagggagatagcgtgattatcgatccgcagggcgagattctgagcagcgcgcctttgcatgaaagagccagactggacgccacactctctctggcagcgctaagcgactatcgcgagcgttttcctgcctggcgcgatgccgatgattttctactgcaccactgatattgagtcgaaatagctaccgaaaaatagcgatgttaaagcgcgtctctcacggcgcgttttttattagcttcatcgttggaatagacagaaaacagtggttgggatgacgaaaacgacaaagccctgagttattgctaactcagggcttctgaatattggcggtgcggacgggactcgaacccgcgacccccggcgtgacaggccggtattctaaccgactgaactaccgcaccgcgctgttgttccggttaagaacgggttgaatattacggttaccccgctatttcgtcaacactttttcctgaaaaataaaccggttgcacagattttcacccaaacgatgaattatcccgcattgactgccgtttcatcttcagcagaagcccgccacaggcagcttccacctttcttctgaaccaaatccaaacgctggttatgagcttccaattcttcatcactggcgtaaataattttcagcccgctggccggacggacgatacgttgaatatcatcggtagaatctgattgattctgatccccttccattgagaaagacagcgaggtttgcccgccggtcatcgccagatagacttcagccaaaatctcggcatcgagcaatgcgccgtgcagcgttcgcttagtattgtctatcagataacggtcacataacgcatcgagattgttcctcttaccggggaacagacggcgcgccaataaaagactatcggttatggtacagaaggtatccgtattcggaattccctgctgtagcattcgaaattcatagtccataaagccgatatcgaacgccgcgttatgaataaccagctcggctccgcgaataaactcgaggaattccggggcgatatcggcaaaagttggcttatctgcgagaaactcatcgctaataccgtggacaccgtaagcttctggatcaaccagacgatccggtttgacatagacgtggaaattccgtccagttaaccggcggttgatcacttcaacagcaccgatctcaataatacgatggccttcatagtgaacgcccagcttattcataccggtggtttcagtatcgagaactatctgtctggtaggtgttgggatcatattgcagtgctcatagcgctcgtttatgtcagacttaaggtttaaaactcattaggaagagtctaccagagatgaccaaacaggtagaaattttcaccgacggatcttgcctaggcaatccgggtcccggtggttatggcgcgattttgcgttacaaacagcacgaaaaaactttcagtgaaggctatcgtctcactaccaataaccgtatggaattgatggcagccatcgttgctctagaagcattgacatcaccctgtgaagtcacgctcagtaccgacagtcaatatgtgcgtcagggcattactcagtggattcataactggaaaaaacgcggctggaaaacggccgaccgcaagccggtccgcaatgtggatttgtggaaacggttggacgcggcaatttcggatcataaagtgcagtgggagtgggttaaaggccacgcagggcacccggaaaacgaacgttgcgacgtattggcgcgcgatgcagccaacgctcccactcaggaagataccggctataatccggactaattccgagtcttaagggcgattacggtaacttttcgttgcgcccacggttcggcttaaccagggttttcgcgatcccattttcattgggttgaacgtcagtggaatcgtgcgttttctggccacaatcagactgatgcaacctaatgcatgtagatgggtgctgataaagcgcccgccttgtttatgccacggcagtacgtggaaactggattcatgcatcacttcatagttcagcaggctgagccaatccagtaaacgcatttgcgtaaacattctgctcgcgtaaggttggcgtcgacgtatcaccggcagtaattttccaaccccaagtaaactcaacggattgaaagtgctgattaccagccaaccatcgttgatcaacacgcgatccgcctcgcgtaaaattcgatgaggatcggttgaataagccagcgtatgagataacagacaggcgtccaccgatttttcagcaaaaggaagctggtaaggactggccagtacctgcatattgctgcccttatccccaacgttaacctgatgggaaacagcgcagctttcactggcaatctccgcactgagttgcccaattttaagcagatgaaaaccgaaaatctttggccaccagggctgtagctgttgctcaatagcggcccgataatactctccccaaggtagctcggcccaggaagctggggcaggaatcttttggcgtgtttgcgctggtttcatgttttattatcttctatcaagctgttgccaacgagaggtatccgatgaatcttatcagcattcctgcatttcaagacaattacatttggctattggttaacccgctgcagcgctgcctgatcgtcgatccgggagaagccgcgccggtactgagcgaactaaaagaaaaaggctggattcccgaaggaattctgttgactcaccaccatcacgatcacgtcggcggagtgaccgaaatactccagaacttccccaatattccggtttatggcccgcaggaaacggcacataaaggggctacgaatatcgtaaaagacggcgatagcctgtctttgtgtggacaaattttcagcgtaattgccgttcccggacacactctcggccatatcgcatactacagcgcaccttatcttttttgcggtgatacgttattttccggcggctgcggaaggctgtttgaaggttcgccccaacaaatgtacgcatcaattcaacgactcgcacagttggccgatgaaaccttaatttgcagcgcgcatgaatatactctttcgaatcttaactttgcccgtgcagttttaccacaagatcgagatattgaaacatatcaacaacaaatcaagcaattaagagcaaaaaaccactcaagcttaccctcaaaattgcaattagagcgtaaaattaatgtttttttacgctgtgatgacattgatttacaaaggaatttaggtatagacctcccacctaatgacctctccctgatttttgctgaattacgtgcccgtaaagatagcttctgaagcttttagttgtgttatttgtcgaagcaaagtatgattgctcgtcttttaagcaactaacattgacacacacatgaagaccaaagcgatatttctcgcctcagtcttgcttgtagggtgccaagcgtccaggcaggacgtgcaggttcccgtgcagcatgcacagagtttgtcttcggcaggtcaagaaagtgaagcaggaaagtacacggatagtgcccgagagggctccgcgcgatggctggaaagtgataccggcgtcgcgcagaacgatctgtggaacttcattagcgacgagctgaagatgaaggttcaggataatgccctgatccgtgaacaaaaacgaaagtatttaaaaaataagagctatctccacgatgtaacattacgggcagagccgtacatgtacctgatagtcgagcaaattaagcaacgtaagatgccgatggagctggtactgctacccatagtggagagcgcttttgacccacacgctacttcctccgccaacgccgcagggctatggcagatagtaccgagtaccggtcgaaattatggattaaagcaaaaccaatggtatgacggccgccgcgatgtggttgcctcgaccaaggcagcgcttgatatgatggaacgcctgaacaaaatgtttaacggtgactggttattaaccatcgccgcttataacagtggtgaaggccgagtcatgcaggcagtgaaagccaataaagccaagggtaaaccgaccaatttctgggcattgtcgcttccgcgtgaaacgtcaatttatgtccctaaaatgctggccttgagtgacattatcaagaacagcaagaaatacggtatcaagttacctgaaaccaacgaaaaccgtgcattagcgcgtgtggacgtcggtcagcagatagagctaactcaggcggctgagatggcaggaatgtcgctgaccaagctgaaagcttataattcagggtataagcgcaatgtaacggcacctaacggccctcattacattatgttgccgaaaacccatgcagagcagtttaaagactcactggctgacactgatattgttgtgtccaaatccactcaagtggctaataacacaaaaacatcagcatcaggttcgcagtataaagttcgccctggcgacactttatctacgatagccaagcgactgaatatcaagaccagcgatttgcagagttggaacaacttacgtacctcgagtaccttaaaagttgggcaaaccctgcaattggcaagcaatacggccagcaaaagcatcacctatcaggttcgtaaaggtgattcatttgccagtattgccaagcgtcacggtgtaaacaccaacgatgtgatgcgatggaattcggtagtcagcaaggccaacagtttgcaacctggtttaaaattgaccctatatgtcaacggtcaaaaagcgccagatgcgtaatgcattaaggttataacggctaaaaagcacccttcggggtgctttttttatgtctgcaatttgtcattaatgaaggttgacgcgagcgaattaaggtttgaattcaaccagtaagggattgtgatcggaggctctggtcaccatcacttcggcatcagcaacttttaattcgcggtaaaaaacatagtccaacggccggccaaaagctcggctacgattatcggcctgaaactcgacttcctgtaaaccctggcttctggcgaatttcagtaatgctctaattcgctgacgactccaggcattaaaatcgccagccagaatcaccgggccacgatgcattgagatttgttcaccaatgggttccaactgcttgctgtaaacgtctacgcccaagctaaaattcacagcatgaatattggccaccatcagcaatcggccatcatgaatgggataaactgttaccaatgctgatttagccaagcgtagcaggggttcacgctctcgcagcgggcagcagtagactgggtgagcggcagcaagcgtcattacgccagagggatgctgaggcagcgcaaaggcaggcacctgatcggctgcctgaaaattagacgtcgcaaatctcaccagttcaggggtggtttgtgcttcttgcaacagcatcagttgagcatctctgccaaaacctctcagcacagagagccaatctggccgctgctgcttaaagatattccataccataatccgcagacgctcagaagtcggtaatggaacgcccggaggtagtccctgccctagctgactggcagagcccggaaagatttgctcgactggttgccctgcaacatagcgcatggcataggtttttttcggcacgctcttgcccattcccgttaaaaacaaactggccagatggaccagcctgtaattgagtattatacgctcagatattcttcagccagacatttcttttgctggctatcaacacgtccaattgaggaatactgtctgatagcgcgaacggactcaagtccgaataggcaacgaggatgatttacatcataaaagaacacgcttttcgcgggcttagagcacgtataaattatttgaataacatggtttggccaatcgtttcagcttcccatgagttctatccgtgttgatgataaatcagctggctatcgctgggcgaaaatgccgtttatccaaccggccgctaaccctaatcagcgccaacgctccaatcactatcacaccgccaacccagggggtttgagctaattcccattgggaaacgatctgtccaccgataagcgatcccaaggcgatccccacgttaaaagcggcgatattcaaccctgaagcaatatccaccgcatgtggcgtatattcctcggctttctgtaccacatatacctgcaagccaggcacgttgccaaatgcaaagattcccatagccattaaagtaattagagcggcaatgctgtggctcgccgtaaactgaaaaataaacagtagcgcagccaacgcagtgaaaataaagctcagtgccggtaccgcaccgtaccgatctgctaatttaccgccccaaatattcccaatcgcgactgaaactccgtatgccagcaagatccagctcaccgctggcgcagagaaaccggccaattcctgcatcatcggtgccaggaaagtgaacatagtgaaaacgccgccgtaccccagcgcagtaatggcataaatcagtaataaacgcggatgagttaatacctgcaactgctgctttaaaccggcactggctttattgggaatattactgggaatcaaaataacgctggcaacgatcgccactgcaccaatcaatgagacagctaaaaaggtttcacgccagccaaaatgctgcccgataaaggtacctagaggcacgccagtgactaaggctaccgtcaacccaccaaacataattgcaattgcagatgcggctttctctttcggcaccagaccggttgcgatggtagaaccgattgagaagaacacgccgtgagccagcccggtcagcagccgagccactatcaacgattcataacccggagcctgccatgccagcacattgcccagagtaaatagtatcatcagaccaatcagcaaggttttccgaggaatacgccctgttaatgcggtcaatactggtgcgccaattgctacgcccagcgcgtaaatagaaaccagtaaaccagctgatggtaccgaaacatttagctgttcagcaatcgtgggcactagcccaacaatcacaaactcggtggtaccaatagcaaaagcgctaatggtcaatgctagtaaggctaaaggcatcgttgactccagataaaataagtatcgacttgataagccgcattatgagcttctctctggatgacaaaaatgataaaaatatcaaaatatttttgctggattagcaataatgaaagctaactctgatgagctaattacctttgtaaccgtggttgaatgcggcagtttcagccgagctgccgagcagcttgaacaagctaactccgtggtcagcagaaccgttaagaagctagaaaccaaactgggcgtaacattgctgaatcgtactacacgacaaatcagcctaacgcaggaaggcgagcattactttagacgcacgcaggcgattttgcgtgaaatggcattggcggaaaatgaactgctcgataatccgctgaatccaagaggactattgcgcattgatgcctctactccggtaatcttgcatatgctggcaccgctagtggctagtttcagagtgcgctatccgttaatggcactctcattagtttcctcggagacatttatcaatctgatagaacgtaaagtcgatatcgccattcgcgtaggcacattgcaggattcaactctgcgcgccagaaagctgatgaatagttaccgccatattgtggcttctcctgcttatctacagcgctacggcactccacgcactgcggctgaactacagcaacatgtttgtctgggatttaacgatctcccagcgctcaaccgctggccgctattagctcatgatggccagttactggagattaactcggatgtaagttcaaataatggggaaacccagcggcggctttgtcttgaggggaatggtgttgcctgtttgtctgactttatgattcaaaaagatattgatcggggagacttagttccgatattaaaggatctgacgattccagtcgtcatgccaatcaatgcggtttattacagcgatcaggctgtcagtagccggttgcgctgttttattgacttcgtcaccgagcgattagcggaaaatagcaatgaagcaacaacctgacggcaaatatgccgtcagatataacaggctggcattaatcccaatccggagccaaaccttcagggctaaccagacgctcattacgatccaaggcagccatttgtgccatgttttcgtcggtcaattttaattcctgagccaatagattactggctaaattagcttctttggttgaggacggaataaccgaataacctaactgcatcgcccaggccagaataacctgcgccggcgtagcattacgcagtttagccatttgctgaatcactggctcttgcagagctttaccgtaagccagtgtcatatatgaagtaatcgctataccgtgctggcgagcaaacttcaccactttggcgttctgtaataatggagatagttcgatttgattagtagcgatagcttcggctccaacggcatcaatcgcttgctgcatcagatcgatagtaaagtttgaaacgccgatctggcgagtcagacctaattctttagccttcaataactcagccataaactcagcgactggaacttcattctttggtgatggccagtggatcagcgtgagatcgacataatccgttttcagtttttgtaagctttcacgcagagtgggaatcagtttttccgtagacagattggcgatccaaattttggtggtaataaacaactcttcacgcttaacgccactctcagcaatggcttgcccaacagcggcttcattttcatagatttgtgccgtatcaattgcgcgatagcccagtttcaacgcggtggaaactgaatcgataacaacctgatcttgcaggcgaaaagtacccaatccaaatgcagggatgctcattttacttcctcatattttgtctgatcgtcatatctatcattagtcattgtttgcctttcactgcggcgaccgataatcccgctgccgttgaaagatgaactgattatggcctgagttttatcaacaaaaaatgtagtattcagcataatacttttgataaaaaatcaaatataggaaagtaattattgaatctgatagtagcaagccgtacataaaacgttcttaaggcggctcaaaactctttatcaccaaaggccacacctatcaaaagtgatataattctcagttatcccttttaaatgacccatcgcagtaaaaataaacatgattttcggagcacttaagcgacttatttacgcatgtatagtcgttagccaaaagattcaaagcagagaaaacaaccgagctacggcaagcaattgtaagaggtttatgactaagtgattggctataaggtgttgagaatccattaaatgaaatcaaaaagataagaatatagggatagggatagggatagggatagagatagagatagtattgatgattagtatttacccgctctgcttatctgagcgaaaaattctaaagattaaaatgcaaaaaaccctgaatcaaagattcagggttatgcaataagtggcggaacggacggggctcgaacccgcgaccccctgcgtgacaggcaggtattctaaccaactgaactaccgctccaccgattctgttacttatacttccgtatatattcccgttagggccagcatgtccttgctgtttagccaccagatgtcactctgataacttgtgtttgatgcctggcagtgtcctactctcgcatggggagaccccacactaccatcggcgctacggcgtttcacttctgagttcggcatgggatcaggtgggaccaccgcgctattgccgccaggcaaattctgtttcaatcaacccgccacgtgatttacaccacacagccagtcaatccaatctgttaacaatgctgaaaatcaaaacgctctctaaaacaccttcggtgttgtaaggttaagcctcacggatcattagtactggttagctcaatgcatcgctgcacttacacacccagcctatcaacgtcatagtctttaacgttccttcagggggcttaaagccccagggaagactcatcttgaggcaagtttcgcgcttagatgctttcagcgcttatcttttccgcatttagctaccgggcaatgccattggcatgacaacccgaacaccagtgatgcgtccactccggtcctctcgtactaggagcagcccctctcaatcttccaacgcccacggcagatagggaccgaactgtctcacgacgttctaaacccagctcgcgtaccactttaaatggcgaacagccatacccttgggacctacttcagccccaggatgtgatgagccgacatcgaggtgccaaacaccgccgtcgatatgaactcttgggcggtatcagcctgttatccccggagtaccttttatccgttgagcgatggcccttccattcagaaccaccggatcactaagacctactttcgtacctgctcgagccgtcactctcgcagtcaagctagcttatgcctttgcactaacctcacgatgtccgaccgtgattagctaaccttcgtgctcctccgttactctttgggaggagaccgccccagtcaaactacccaccagacactgtcctcaccccagattatggggccgagttagaacatcaaacattaaagggtggtatttcaaggttggctccacgcagactggcgtccacgcttcgatgcctcccacctatcctacacatcaaggctcaatgttcagtgtcaagctatagtaaaggttcacggggtctttccgtcttgccgcgggtacactgcatcttcacagcgagttcaatttcactgagtctcgggtggagacagcctggccatcattacgccattcgtgcaggtcggaacttacccgacaaggaatttcgctaccttaggaccgttatagttacggccgccgtttactggggcttcgatcaagagcttcgccttgcggctgaccccatcaattaaccttccagcaccgggcaggcgtcacaccgtatacgtccactttcgtgtttgcacagtgctgtgtttttattaaacagttgcagccagctggtatctgcgactggcttcagctccgagagcaagtctcttcacctagcgccagcgtgccttctcccgaagttacggcaccattttgcctagttccttcacccgagttctctcaagcgcctgagtattctctacctgaccacctgtgtcggtttggggtacgatttaatgttacctgatgcttagaggcttttcctggaagcttggcatcaactacttctgcaccgtagtgcatcgtcatcacgcctcagggttgatggttttccggatttaccaggaatacccccctacacgcttaaaccgggacaaccgtcgcccggctagcctagccttctccgtccccccttcgcagtaacaccaagtacaggaatattaacctgtttcccatcgactacgcttttcagcctcgccttaggggtcgactcaccctgccccgattaacgttggacaggaacccttggtcttccggcgtgcgggtttttcacccgcattatcgttacttatgtcagcattcgcacttctgatacctccagcagtcctcacagactaccttcaacggcttacagaacgctcccctacccaacaacacctaagtgtcgctgccgcagcttcggtgcatggtttagccccgttacatcttccgcgcaggccgactcgaccagtgagctattacgctttctttaaatgatggctgcttctaagccaacatcctggctgtctatgccttcccacatcgtttcccacttaaccatgactttgggaccttagctggcggtctgggttgtttccctcttcacgacggacgttagcacccgccgtgtgtctcccgtgataacattcttcggtattcggagtttgcatcggtttggtaatccgggatggacccctagccgaaacagtgctctacccccgaagatgagttcacgaggcgctacctaaatagctttcggggagaaccagctatctcccggtttgattggcctttcacccccagccacaagtcatccgctaatttttcaacattagtcggttcggtcctccagttagtgttacccaaccttcaacctgcccatggctagatcaccgggtttcgggtctataccttgcaactagacgcccagttaagactcggtttccctacggctcccctatacggttaaccttgctacaaaatataagtcgctgacccattatacaaaaggtacgcagtcacaccacgaaggtgctcccactgcttgtacgtacacggtttcaggttctatttcactcccctcgccggggttcttttcgcctttccctcacggtactggttcactatcggtcagtcaggagtatttagccttggaggatggtccccccatattcagacaggatgtcacgtgtcccgccctactcatcgagttcacagcatgtgcatttttgtgtacgggactatcaccctgtaccatgcgactttccagacgcttccactaacacacaaactgattcagactctgggctcctccccgttcgctcgccgctactaggggaatctcggttgatttcttttcctcggggtacttagatgtttcagttcccccggttcgcctcgttagactatgtattcatctaacgatagtgcaacgaattgcactgggtttccccattcgggtatcgtcggttgtaacgcttcatatcagcttaccgacgcttttcgcagattagcacgcccttcatcgcctctgactgcctaggcatccaccgtgtacgcttagtcgcttaacctcacaacccgaaggtgtctttcgacatcatcgtgctgcgattattgagagactctacctgcaggtgactccttgtctcggtaaatctacggagagacaagttttagctgcagtgtttcaattttcagcttgttccagattgttaaagagcaatatcttaaacacgactcgttaaagtcatctttaagatattcagttgataatgtctttcactcattatcggatggcgtccccaaggggattcgaacccctgttaccgccgtgaaagggcggtgtcctaggcctctagacgatggggacacaggaaattccgactaaatcaaaaacttaatcgtttctcgtgtcatcatgagtcgaaactcacgacatcaacaggtgctcttgctcattactattatcagacaatctgtgtggacactacgcaatgcgtatcattaggtaaggaggtgatccaaccgcaggttcccctacggttaccttgttacgacttcaccccagtcatgaatcacaaagtggtaagcgccctcccgaaggttaagctacctacttcttttgcaacccactcccatggtgtgacgggcggtgtgtacaaggcccgggaacgtattcaccgtagcattctgatctacgattactagcgattccgacttcatggagtcgagttgcagactccaatccggactacgacagactttatgtggtccgcttgctctcgcgagttcgcttcactttgtatctgccattgtagcacgtgtgtagccctactcgtaagggccatgatgacttgacgtcatccccaccttcctccggtttatcaccggcagtctcccttgagttcccaccatgacgtgctggcaacaaaggataagggttgcgctcgttgcgggacttaacccaacatttcacaacacgagctgacgacagccatgcagcacctgtctcacagttcccgaaggcaccgaagcatctctgctacgttctgtggatgtcaagagtaggtaaggttcttcgcgttgcatcgaattaaaccacatgctccaccgcttgtgcgggcccccgtcaattcatttgagttttaaccttgcggccgtactccccaggcggtcgacttaacgcgttagctccggaagccacgcctcaagggcacaacctccaagtcgacatcgtttacagcgtggactaccagggtatctaatcctgtttgctccccacgctttcgcacctgagcgccagtctttgtccagggggccgccttcgccaccggtattcctccagatctctacgcatttcaccgctacacctggaattctacccccctctacaagactctagcttgccagtttcaaatgcagttcccaagttaagctcggggatttcacatctgacttaacaaaccgcctgcgtgcgctttacgcccagtaattccgattaacgcttgcaccctccgtattaccgcggctgctggcacggagttagccggtgcttcttctgcgagtaacgtcaatcacttcacgtattaggtgaaatgccttcctcctcgctgaaagtgctttacaacccgaaggccttcttcacacacgcggcatggctgcatcaggcttgcgcccattgtgcaatattccccactgctgcctcccgtaggagtctggaccgtgtctcagttccagtgtggctggtcatcctctcagaccagctagggatcgtcgcctaggtgagccattaccccacctactagctaatcccatctgggcacatccgatggcgtgaggccctaaggtcccccactttgctcttgcgaggttatgcggtattagctaccgtttccagtagttatccccctccatcaggcagtttcccagacattactcacccgtccgccgctcgccggcaaagtagcaagctactttccgctgccgctcgacttgcatgtgttaggcctgccgccagcgttcaatctgagccatgatcaaactcttcaatttaagatttgtttgatttgctaccgaagtagcgatgctcaaagattactttctgcaaatatgcattcgaaccgaagttcaaatgtttactgctttggtcactcttcaagacttgatatttcttctgcctgccgaaacaggctttgatatcgccttgcgagtgcccacacagattgtctgataaattgttaaagagcagtgagttagcaacctttcggtgggtaactcgaggtgcgcatattacgctttcctcactcagagtcaactacttatttcgttgaatttctctgttctctttgccggccactcagttacttgattcgctgtgtgccgtctcgatggatgcgcattatagggagttccgcgcaggccgcaactgctaatttcaattaaaatgatcgtttgctgcattccacagcaaaaccccgctttataccttgttgtgcacaaacttatccacagatgcaatctgaactgaaaattgacgagcatcacgcaatcgttttcgctacaattccccgcgtcgaaaatgcgtgtcgatattcataaaatattgtccccgcggatcgattattggcaaaaggatgcaagcggagctgaaattaggtgtgtttttctacttttcacgcaattccactcctttgtacccggcagaaaacccatttcgggacgttatctgaatctgttcctttctatatagatagaagtgcaaggtagagattcacgtaacgctctatttatagcgaatgaaaaactgcgattccaaagccaagggataaaaccatgcaacaacgccgtccaatccgccgtgctctgcttagtgtgtctgataaagcaggtatcattgaattcgccgaagcgctttctcagcgtggcatcgaattgctctccaccggcggcaccgcgcgcctgctagccgacgcaggcctgccggttaccgaagtttctgattacaccggtttcccggaaatgatggatggccgtgttaaaaccctgcatcctaaaattcacggcggtattctcggtcgtcgcgatcaggacgatgccatcatggcagaacatgatattcagccgatcgatatggtcgtagtaaatctgtatccttttgcccaaaccgttgctcgaccggattgctccttagaggacgccgttgagaatatcgatatcggcggcccaaccatggtgcgctccgccgccaagaaccacaaagacgtggccatcgtagtgaagagcagcgactacgcggcaattatcaccgagctggataacaacgacggttccctgacttacccaactcgcttcaaccttgctattaaggcgtttgagcatactgccgcctacgacagcatgatcgccaactactttggctctatggttcctgcctatcacggcgataccgagcagcctgctggccgcttcccacggaccctgaatcttaactatataaagaaacaggatatgcgctacggtgaaaacagccaccagcaggccgccttctatatagaagaggaagtgaaagaagcttccgttgctaccgcagagcaacggcagggcaaagcgctttcttataacaacatagccgacaccgatgccgcgctggaatgcgtgaaagaattcagcgagccagcctgtgtcatcgtcaaacacgcaaatccatgtggcgttgctatcggggattccattctggcagcctacaacaacgcatataaaaccgatccgacttccgcgttcggcggcattatcgcctttaaccgcgaactggatgccgaaaccgctcaggctattatcagccgtcagtttgtcgaagtgattatctccccaagcgttagcgcggatgccctgaaactattagcaaccaagcagaatgtgcgcgttctcacctgcggtcagtggcaaggacgatctgtcggtctggatttcaaacgcgtcaacggcggtttgctggtgcaagatcgtgatttagggatggtgactgaagcggatcttcgcgtagtgtccaaacgtcagccaacggctcaggagctgcgtgacgcattattctgctggaaagttgcgaagttcgttaaatccaatgccattgtctatgctcgcgataacatgaccatcggtataggcgcaggccagatgagccgcgtctactccgccaagatcgccgggatcaaagccgcagacgaaggcttgcaggtggccggttccgccatggcgtccgatgccttcttcccgttccgtgacggtattgacgctgccgccgccgtgggtattacctgtgtgatccaaccgggcggttcgatccgcgacgacgaagtgattgcagcggcagatgaacatggcattgccatgatcttcaccgatatgcgccatttccgtcattaattaacctcacggagttatcccgatgaatattttgattattggtaacggcggtcgcgaacacgctttgggctggaaagccgcgcagtcacctctggcggataaaatctatgtggccccgggtaacgccggtaccgcgctggaaccgcgactggaaaacgttgatatagccgcaacggatatcgccagcctggtcgctttcgctaaaagccacgatatcggtctgaccatcgttggcccggaagctccgctggtgattggcgtggtggatgctttccgggaagcgggtttgactatctttggcccaactcaggctgcggcgcaattggaaggctctaaagccttcaccaaagacttcctagcccgtcatgatattccgacggcgttttaccaaaacttcaccgaaatcgaaccggccttggcctacgttcgtaagataggcgcacctatcgtcatcaaagctgacggtttggccgcgggtaagggcgtgatcgtagcgatgacgctcgaagaagcggaaaccgccgttcacgacatgctggcaggcaacgcttttggcgatgcgggtcatcgtatcgtggtggaagaattcctcgatggcgaagaagccagctttatcgtcatggtcgatggtgaaaacgtattgccgatggcaaccagtcaggatcacaagcgagttggcgatggcgataccggcccgaataccggcggtatgggcgcttattcaccggctccggtagtaaccgatgaaattcaccaacgagtgatggatcagattatctggccaacggtgcgcggtatggcggcggaaggcaatgtgtataccggtttcctctatgctggcctgatgatttctgcagagggtcaacctaaagtgattgagttcaactgccgctttggcgatccggaaactcagccgatcatgctgcggatgcgttctgacttggtcgagctttgtctggctggcgctcaaggcaagctgaatcagaaaacctccgattgggatgaacgaccgtcattaggcgtggtgctggctgcgggcggctaccctgccgaatatcgtcagggagatgtcattcacgggttgccacagcaggaaatcgcaggtgaaaaggtgttccacgctggaacccgcctagctggcaataatgacgtggtgaccaacggtggccgagtgctctgcgtgaccgctttaggcaaagacgtcgcggatgcacagcagcgggcatatcagttggcttcagacattcattgggaaggtagtttctgccggaaagatatcggctatcgcgctatcgctcgcggtaaataatctggtattccagagggcgcaacgcctgcgccctcttcttcagtccaggctacaaacatccatttcgatacaagcatgctaaataacgcggtattaacgctacaaactgccgggctctggctcccaacgacaaaaatcttcatttgctactaacaacaactcttgcccttccggcgcattcaaccaggcgacaccgagtggttgctgcgtattactcgcccgtttagccagccacgcctgcgcatagtcttcaaacttaggccgctgaacgctgccgctacagctcgtcagcacgccattttgcaagcgaccttgaatcagatccacattaccggcacgtagagtggtactcagttccagaatacgtttggcttcaaactgatgaaaagcgatctcatccgccgtcagcagctcgcggcgcgaggccagttggcgctgcataaaactcaccgcaccctgttcatcaaaacgaagttggatggtttctggattttggccgatatcgtttcgccgaatttggcgcagaattccgtgctgatattcatagaaggccacgcgagtgacaccgccctggtaagggctgtaaacgctcataatcacttggggatgttgctgagaatcatcctgacgccagatgcgaactacaccgctatcggcaatgtaaccgctggcactgaactggggggaatcggaatggctgctacaggcgctgagaccaatggcaaaacccaaggtcatcagcacccgccgcataaacaaaaggggctttgccacccctctgcttattattttcactgacacactattatttaacagagtctttcagtgctttgccagaaacgaacgcaggaacgttagctgcagcaattttgatttctttaccggtctgtgggttgcggccagtgcgttcgttacgatgattcactttgaaagtaccgaaaccaaccaattgtacttgctcgccttctttcagagactcggtaatggcagccagagtggactccaaagcagctttagcttgggttttggaaaggtccgctttgtccgcgattacgtcaatcagttgagtcttattcataagttatccttacagtgtgtttatcgtttgcaaagcatcgagtgcgacggatatgccgaatgacagcactctcctgcatacacgcaccgatagccactttttttcgccccccaaatgtagaacagacagggggcagatgtgaagccttaaggcacgacaaatcaggcgttaaatcacgttttcttgccttattgcgttaaatttatgccaatgttactcacagcggcttcccgcaggtcagatcgtaaccctttgatcagatctaaatcgcgttcttcacagtcggccaacaggcggaaaatctcccattggatgtcccattcttcttcaaccgccggtaaaactttcagttcttcgtcggtcatttctttgccagcctgagtcatttccagcatggcaacggtgcgaattgacgtctcgctgatagcaatagcatgttccagagtttcaccgcttaaacgcgagtgaatggcctcacctaatgcaatgcaggcatcaatggctggatacacgccgtaaatggcgtaatcgtcagcggaaggaatcgcttcttcgagcttttccagttggctatcgaagttcactttggcgtcttttaccaccagcgtttcccagatcaaatccagaatacgtcgataaaccgccggatcgccaaattcggtttccaggcaaaatttctggtaattcggatacatacgctcacataagcacgccatgaaagtcagatgttgccagctttccagcttttcgagacgtaaatggattgggttacgtaacatgatcagatctcattcttcattatctgcgcggcagtgtacccgaaattaaatcatatacctatgagagaaaaaccgcctcgctcggtgctaaataagataatttcagaaatgccaatcgtccttcatgttaatctgccaaggtgactaattggtacaaagctaattatttactagaaaataaatatacctacacctgcttcgtcccacttccaatcacgccaacacggtatcaaatcaagccagattcataatcagcgcaagatgaaaaccgcctgatcgatcacagcaaaacatcttcttgctattaagcaggtcaatgccaacggaaccggagtgacccaatgatacgagcattattaaaaaataaatggatatttagtcttctattcttcgctgagacagcgctttctgccgatcttctcgataaggtattacgtgaaactatagtttatcaatctgttattgaggcctcatcggggaaaacattcacaatccggattaatctgtaccaaccggcgggaaatggcccttttccgctggttattctcaatcacggaattgatcctgacggaaaccaaaatgagcgcacgcgctttcacgttgcggctcgcgagtttgtgaaacgcggctacgtggtgatggcgccacagcgtttcggatttggtggttctgaaggaccttttgacattgtgccctgccaacctgatagctacgcttcccgttcgctgcaagaactgaatgccactctaagccatgcccgccagttgccctatgtggataatgagaaaatcattattgccggtcactccgtaggaggacttatcacaatgaaggccggagaacaggagatgcagggcgtgaaaggcctgattaatatggcgggcggttataaatggcctgactgcgactggaaaacacccttgagggcaactatgcagcaggcaggacactcttcccttccctcgttatgggtttatacggaaaatgactcgttattctcaattgagctgggtagggccatgtttgagtcatatcgggagaattggttaaaaactaatggtgctcatgaagtaatgccacgttttgttgcgttaaagccctttgccaatgaaggccatgcttttttccagtggcaggatggagtccagttctggtggcctcccgtggagctatttttgaccgaattgggtttaccaacggcgattgtcacagacatcactgcgcccagccgaaccgaagccagcggtttcgccagtatcaatgacgtcgaaagtgttccttttagcgaacgcaataaagaaagtggacaagaggcttataaacagtttttagatgcaaagtcgccacgggcttttgcattgagtgaagatggcgatagctggggctggtttaatagacaaaataacgtactggaagatgcgctggagctttgtaataacaatacgctaaaagcctgtcggatttacgccaacgacggtgatgtggtttggtaatatttcacgccggactgatatctgacaacgaatccggcgagtttttttaaccttttgtcgctattgccagccaacgctgaaaagcaggtcgattcgacgcgatagcatcagcccaacgtgttggctccggtaaacggtaaccccgcatacagttttgaacccaaaccaatgcgctatccatactgatacggtgccctggcgaaataaacagcggattacagcgcggtttactccgccatacccagcccaatggttcatccccatcaatcaatggttgcaaggtattgttttctaaaggggaaaactgaccgcacaggcgacttttcgccacgccaatggttggtacatccgccagcaggccaaaatggctggctacgcctaatcgacgtggatgcgcaacaccctgcccgtccaccagcactaaatcgggccgatgctgtaactgcgcccaggccgccatcaacgcgggatactcacgaaaagaaagcaaacccggaatatagggcaaggaagtggcaactctggctatttgatattccactaactcaagggagggataacgtagaatggcgatagccgctcgcgttaccgtcccctgttgctcaaaaccgacgtcggcaccggcaatccattgtggcaccctgaagtcaggatcgtcatggaggataatttccgcggctcgctgtcgttgttcctgacgcaatccctgagtatccaccctgtttcctccgcttagacgtggttttatcgatacgtaatattaatttatacgcgatcttggtttaaacatgatattggcgcgacaggttgtgtaccgcttcaacgaatacgcccgcatgctctggcggcacatcctgatggataccgtggcccagattgaacacgtggccttcgccatgcccaaagccagccagaatcgagcttacctcctgctgaatacgtgctgctggcgcatacaacaccgagggatccatattgccttgtagagccactttatcgcccacgcgacgacgtgcttcagcgatatccagagtccaatccaaccctaatgcatcacaaccggttgccgccattgcttccagccactgtccgcctcctttggtgaagagagtgactggcacacgacggccgtcgttctcgcggatcaaaccggcgacaattttgtgcatatattgcagggagaattcgaggtagtcacggccagtcaatacgccgccccaagtatcaaacaccatcaccgactgcgcaccggctttaatttgcgcattcagatacaaaatcacgctatcggccaatttatccagcagcagatgcaacgtagccggttcggcatacatcatttttttcagcttggtaaaggctttgctgctaccaccttcgaccatataggtcgccagcgtccacgggctaccagagaaaccgatcagcggcacttgccctgccagctcgcggcgaatggtgcgtactgcgttcatcacatagcccagttcttgctctgggtccggtattggcagtttttcgacgtcagcacgacaagtaatcggtgattgaaaacgcgggccttcgcccgtttcaaaataaagccccaatcccattgcgtcaggaatggtcagaatatcggagaataggatcgccgcgtccagcggatagcgacgcaaaggctgcaaagtgacttcacaggctaactctgcgttcttacacagcgccataaaatccccggcctgcgcacgggtcgccttgtattctggcaaataacgccccgcctgccgcatcatccatactggggtaacatctacgggctgacgaagtaaggcgcgcagataacgatcgttcttcaactcattcatatggggctcccttaatgatctggcgctattgtagcatgcctgatttagctgtcctgttcggtgcggcacaatgccacggtatcttcgattaaacggcgggctacagtaccgggcggcggcaacagcggcagttgatcgtaacgataccaattggcgttgagcaattcttttggatcgtggcgcaattcgccgctgtcatactccgccataaaagcaatcatcaatgaatgcgggaacggccagggctgcgaggtcacgtagtgtagatttttaatacgaatattgctttcttccatcacttcgcgggcggtcgcctgttccagcgtttcgcccacttcgacaaaacctgctaataccgtatgaatgccgccacgatgacgcacatgctgagccagcaaaatttcttcgccgcgccgaatcgctacgattacgcagggcgcgatttgcggataataacgttcacggcaatggttgcacagacaggcccattcggtgcggctggcatgcatttgatgaccgcagtaaccgcaaaaacggtgagatcggtaaaactccgccaattgcacgccacgaccagccaactggaataaaccgcgatcgacatccagtaactgacgcaccgatcccatttcgctggacatcagttggcgaattaaccaaaccgcctgcccttgccattcgccgatctgtcgggccgtttttccctgtaatgaccaaagtgccgcgctaccgtagggtaattcccctttgggcagccacaatttgttctcatggctaacgatccaccagccatgttcctcacctgtaagttgtagttccatatcgttgttgcacaacctcgacttcactggcaatctagaatctggcttgttacatttttgtaacctaccgttactttttcttactcacggagtcaatcatgctcaaccgactggaaagcctgactcaacgcgttggcggcagtaatgaattaattgatcaatggcttcatgcacgcaaagaactgttagtctcgtattgcaccgtgatcggtattaaaccgctaaaggaaaagcataccccgctcaatcaaaaagcgctggagaacttttgccataatttggtggattacctctcctccggccacttccatatttacgaccgaataatcaaacaggcagaaggtgcctctagcccaaaaatggcgctggcaaccaagttctatccggcgctaaaagataatactcaaactatcatggctttccacgatcgctataccgacaatgagatcgatcaggatagctgcttcgaattccatcaggcattatcggacatcggcgaagcgcttgacgctcgttttactctggaagacaaattgatccaactggccgccgaatcctgggaagccgctcaccctgcggccaccgaagatccgaagaattaacgccattattcgcgcggatctattacgcaaacttgagcttacactgagtcgcgagcatttggatcacagcccaaattcaaaacgacaaataaaatagcttataagacatacttgtagtttttattctctctcctatactgaggcttcttgtcggagtgcctagcgcaggctttttatccaagcaacgcgcaggctgagaccgttaattcgggatccgcggaacctgatcgggttagtacccgcgaagggaacaagagtaatttatcgctatcgcacggctttcacctttaatggatgagctccgtcgcacctggctaacatcgttactcccgccaagctccagacaagcaattttcccaataaaccacactggtaggaatttgctatgtctaataatactcatgcttctccattggctgcatcagccaaacccaaagcccgtccacgcaaagaacaacgtgaagatgcccaacagtttatcaatacgctacaaggcgttagcttccctaattctcaacggatctacctgcaaggctcaagatcggacattcaggtgccgatgcgtgagattcagctcagcccaaccttaatcggcggcggcaaagacgatcctcgctatgaagataacgaagcgattccagtctatgacaccgcgggtccctacggcgatcctcaggccaaactagatgttcacgcaggattaccgaaactgcgcgatagctggatcgccgatcgtcaggataccgaaatgctggagggcgtaagctccggtttcactcagcagcgtttagcggatgaaggtttggatcatttacgtttcgaacatttgccacgccctaaaaaggcgattgcgggcaaatgcgtaacccaactgcactacgccagagcgggtatcgtcacgccggaaatggaatttatcgctattcgggaaaacatgggtcgtgaacgtattcgcggcgaagtgttacgccaccagcacccgggacaagcctttggtgcccatttaccggaaaatattacgccggaatttgttcgtcaggaagtcgccgctggccgcgccattatccccgccaatattaaccatccagaatctgagccgatgattattggccggaatttcctagtaaaagtgaatgccaatatcggtaattccgcagtgacctcctctatcgaagaagaagtggaaaagctggtctggtccacccgctggggcgcggataccgtcatggacttgtccaccggccgctatattcacgaaacccgcgaatggattttgcgtaatagcccggtgccgatcgggactgtacctatctaccaggcgctggaaaaagtgaacggcgtggcggaaaacctgacctgggaaatgtttcgcgacactttgctggaacaagccgagcaaggagtggattacttcaccattcacgcaggcgtactgctgcgttacgtaccaatgaccgccaaacgcctgaccggcatcgtctcccgcggcggttcgatcatggccaaatggtgtctatcccatcatcaggaaaacttcctgtatcagcatttccgcgaaatctgccaaatctgcgccgcttacgacgtttcattatcactgggtgacggcctgcgccccggttctattcaagatgccaatgatgaagcgcaatttgccgaattgcatactttgggcgagttaaccaagatcgcctgggaatacgacgtgcaggtgatgatcgaaggtcccggccacgtaccaatgcaaatgatccgccgcaatatgacagaagaactggaacattgccacgaagcgccattctatacgctggggccgctaaccaccgatatcgcaccgggttacgatcatttcacttccggcattggtgccgctatgatcggctggtttggctgcgccatgctgtgttacgtcacgccgaaagaacatctgggtctgccaaacaaagaagatgttaaacaaggacttattacctacaaaatcgccgctcacgctgcggatctggccaaggggcatcccggtgcacaaattcgcgataacgctatgtccaaagcgcgttttgaattccgttgggaagatcagttcaatctagcgttagatcctgaaaccgcacgcgcttatcacgatgaaaccctgccgcaggagtctggcaaagtggctcacttctgttccatgtgcgggccgaaattctgttcgatgaagatctcccaggaagtgcgcgactacgcggcagcgcaggaggcagaggcccaaaaaatccagatccaaccctcattggaaacccagcaatccggcatggaacaaatgtccgccgaattccgttctcgtggcagcgagttatatcacagcgccagcattcgtcaggtagaggtcaatgatgaacaagcctgacgcaccttttgctactaccgaaaatcggctaggactttatccagtggtggattcactggaatggatcgagcgcatgctggaagctggcgttactacgctgcaactgcgtatcaaagacgcaacggacatgcaggtcgaggatgatattgccgccgcaattgccttaggtaagcgctatcaggctcggctattcatcaacgattactggcagttagccatcaaatacggtgcttacggcgttcatctgggacaggaagatctggaaatcgccgatttaccggccattcaacgcgccggtttacgcctcggcgtgtctactcatgatgagcaagaactggcgctagcgcgggaactgcgcccgtcttatatcgctttgggacacattttcccaaccgaaaccaagcacatgccgtcttctcctcagggagtcgcggcgttaacccgtcaggtcgccaaaacctccgatttccctacggttgccattggtggcatcactatggagcgcgtgccgcaggtagtcgccagcggcgtgggtagcgtagctgtggtcagtgccattactcgtgcggaaaattggcagcacacaaccgcggaattactgcgtttggttgaaggtaaggagacaattcatgccttatgaacagttgaacgatcaggatttcctgcgctatagccgccaattattgttggaagatatcggcccggagggacagcagaagttcaagcagtctagcgtgctgattgtcggtctgggcggccttggctctccggccgcgctgtatttagccgctgcgggagttgggaaactgtggctagccgatgacgatacattggatatcagtaacctacagcggcaggttctttattgcaccaccgatatcggccagagcaaagctcagttagctcagcgtcgtttacagaatcttaatccgcaaattgaaactatcagccttgatagacgtttagccggtagcgatctggctgacgccgttgccgccgctgatctggtgctggattgctgcgataacatggcaacccgccatcaagtcaacgctgcctgcgtacaagctggaaaacccttgattagcggcagcgcagtcggattcagcggccaattactgattatcgaaccgccttacgccaacggctgctacgcctgcctttatcccggaaaagaaacgcagcaaagaaattgtcgcactgctggcgtccttggcccagttgtcggcgtcatcggcaccctgcaagcattagaagcgataaaaatgctggcgggaatgccatcggcgctgagcgggaaactgcgcttatttgatggaaaacagcaaagctggagcactctacgcttaagcaaagcctgtcattgccaaatctgtggagaagcccagtgaaagtctcgatcaatgatgaactcatcgagttggaagctaacctgacggtcaattccatgctaagccaattgggttatgaccagccgggcaccgcgctggctatcaatcaaaccatcattccccgtgataactgggatcaccatttgttactgaatggcgatgacattttgctgtttcaagcgattgccggaggctgatatgttgaaaattgctgataccacttttacctcacgtttatttaccggaacgggaaaatttgccacgccagccttgatgctggacgcattgcgcgcctccgaatcgcagttagtgaccatggcgatgaaacgggtggatctgaaatcaggcaatgacgctattctggctccattgcaacagcttggtattcgtttgctgcctaatacttctggagcaaaaactgcggaagaagcagtgtttgctgcgcgtttggctcgggaagcgctgggtacgcattggatcaaactggaagtacatccagacgtaaaatatctgctgccagatccagtagaaaccctgaaagcggcagagattctggtcaaagatggctttgtggtcatgccttactgcggcgccgatccggtactatgcaaacgtctggaagaagttggctgtgccgccgtgatgccgcttgcttccccgattggctctaatctagggctgttaactcgtgatttcctgcggattattatcgaacaagccaaagtacctgtcgtagtcgacgctggaattggcgcacctagccatgcgttggaagcaatggaattgggtgcagacgcggttctggtcaataccgccatcgccgttgcccaatcgccagtgcgaatggcgcaggcatttaaactggccgtcgaagctggaacgctggctcgtctggccggtttaggccctcgccaacagcaggctagcgccaccagcccgctgaccgctttccttagccaaagtgaggaacgccataatgcctgaagactttcgtcatcgctggcagcagttagattgggatgacatttcactgcgcatcaacagtaaaaccgcccgtgatgtagaacgggcgttaaatagcagcaagccggatcgggaagatctgatggcgttgatttcaccggcggcgttagcttatctggaaccgatggcacagaaagctcaacagcttactcgccaacgcttcggtaataccgttggtttttatgtgccgctgtatctctctaatctgtgcgccaatgattgcacctactgcggtttctcaatgagtaaccggattaagcgtaagacgttggatgaagaggaaattattcgcgagtgcgaagcgattaaagccctgggatttgagcatctattgttggttaccggtgagcatcaaaccaaagtgggaatggactatttcaggcagcatttacccaccattcgcggccgtttcagctcgctgatgatggaggtgcaaccgctggaagaagaagagtacgccgagctgaaaaccttgggtttggacgcggtgatggtgtatcaggaaacttatcacaccgccacctaccaccagcatcatttacgcgggcagaagcaggatttccattggcgactcgccacgccggatcgtttgggtcgcgcggggatcgacaagatcggtttgggcgcactgatcggtttgtctcataactggcgtactgattgctatatgctggctgagcatttgttttatctacaacaaacttactggcaaacccgctattccatctcgtttccacgtttgcgtccatgcgctggcggaattgagccagcgtcactgatgagcgaatcgcagttggtgcaactgatctgtgcttttcgcctgtttgctcctgatgtagaactgtcactctccactagggagtcaccgttctttcgcgatcacgttattccggtggcgattaacagcgtcagcgccggttcgaaaacccagccgggcggttatgccgatgacgaacatccggagttggaacagtttgcaccccatgataatcgctcgccacagcaggtggcacaggctctcattcaaaccggcttacaaccggtctggaaagactgggatcgctatttggggcgttctctctcatcgctcggctctacacccatagattaagtgttgtaagggtgttgaattaaattattgagcgggtaaagcagctccagtgctggcagcactgaagctggctttaactcgattcgaaaagtcacagccacttaaaagttggcattaatcactgtgtctataatttcgccctcttgcgcatcaacacaatcagacacaatgatccccaaataacttttggttctatatttatattcaatagaaaaccacttattaataccatcatagtctgtaaatccgttagctccgataaaaggagtaaccaggtatccacctatacttgtgtaattaatatatatttcatcatctcttttacttttagccaactcgattaagtcattaatgggctttcttttatttattattgataatacggtataatcagaatattcgtcctgcacatgcactttacaataaccattatcgataacaaaagttttattatcttcccatggcatgatattaatcccctgctctccgccttgatatcgacgtaataggattatttttcctcgaatttcctcaatagagggtattctgttctcgataaaaaaataatcaatatatgcaactaagtaactttttaataaaacgtcgttaaatatttcgttgctaccctcctgttttatcgaaagcataataaactctgtcgggttattttttataaataccaagcaactagctaatacatcgctgaggttctgattcagatagacgttactatgatagagtgctaatacatcctcaaccaggcgacatcttatatccaagaaacgaatgccgttattcaattggatatctatatcccatagttgggtctgaatctgtcccgttggtgtcataaaaggaaaaaaaaccgctgagttatttgttccaggaatagatacgttactcagtaacattgaattacctaacttccccatccaattctttctattcataaattacatccttgtatgaagcttgaagtatgattgagcttatccagtcaatttcgtacgtttaatcgatgtcaaaatttgatctcaaaatgatattcatcattgctgcattattggtatcgacaaaatcagagactattattcctaattgacatgttttacatttcctgtattcatcagcaaaccatttattaagtccatgtataaaaacattacccaccgcccctaattttggagtcacagtcacatcacttaaactggtaaagttaatatataatgcattcttttccctaaccctggcacgttttattaatttagccacatattctcttttgttatcaaagtttgaaaaattatagccagagtatttatcttgaatatatatattgtaatttctatttttgatcgtaaaggtgtcattatctttccattgagtagcattaatacctaaatcacctccgtaataacgccgaaaaagaacaattttcccagcaatctccttaacagtcggaattttattttttatgaaaaaaaagtcattatgattttttatatatcgctcagacatgaccttgtgaaatggcatggtactatctttttcggtatattcttttttaactgaaagtataataaattctgtcggattatctgataaaaacttaatacaagtcgctaatatatctccgaaatttaaacctaaataaacgcttccatggtgcagagttaatacattttcaataagacgacacctgatatcgagaaatcttataccatgatctaattgctctcttatattccatcgctgcgtctgaacatatccaaatgaaataggatgatgggtatatgcagcggaatcatgagttccaggaatagagagttcactcagaaaccttgattcatctaccaatccgatccagttattagtagcacctatcataaatttatatccttatataagataaaactcctacgatatatagcaaatactctattacaattaacataattcagaaaaacattctatcgagaataaatgtaagcatgcagacttattatagaaataataaaattaaaaatagaatgtattgaatatttaaggtgtattcagatacgacggtatcatgcctggctgagaaagtaagggggatgacaaatagcatcgtggaaagaaatgaggtcaacatcttgaaaatcggcgtaaaaaaaatccgagaatgaaaacattctcggattttactcagtataagaatcgttcaacggatccttatactgattggcattacccccgaaggagtatttttacgttactggccaacaaagagattagtctttgctgttaccgaaacctgcgttaagcaattcagccaggttggcagttgcttcatccgcgctaacctgcggaacaacaggggtttcgccctgagctttacgacgcatgcgatcctgatgataagcgtaaccggtaccggctggaatcagacgaccaacgattacgttctctttcaggccacgcagttcatcacgtttaccggcaacggccgcttcggtaagaacacgcgtagtttcctggaacgatgctgcagagatgaaggactcggtcgccaaggatgccttggtgatacccagcaggtcacgagtgaacgtggcctcgattttgccttcagctgccaacttacggttagcgattttaacgcgagacatttctgcctgctcgccttccaggaagtcggtgccacctgcatcaacgatggtgcctttacgcagcatctgacgaacgataacttcgatgtgtttatcgttaatcttaacgccttgcagacggtaaacttcctgcacttcgttggtgatgtaacgggtcacggcgtgaacgccacgcagacgcagaatgtcgtgtggagattctgggccgtcggaaaccacgtcaccgcgttctacaacttcaccttcgaacacgttgagctgacgccacttaggaatcatctcttcgtatgcatcgctaccatccaacggtgaaatcaccagacgacgcttgcctttggtctctttaccgaacgagatgatcccgctgatttcagccaggattgcaggctctttcggacgacgtgcttcgaacaagtcagcaacacgtggcagaccaccggtaatatccttggtaccgctggattcctgcggaatacgcgccaaagtatcaccagcaccgatctgaataccgtcttccagctgaacaatcgctttacctggcaggaagtattgagcaggcatatcagtacctgggatcaatacatcgtcgcctttagcgtcaacgattttcagtgctggacgcaggtctttaccgctaccggtacgctctgcggagtccagaacgaccagagaagacaaaccggtcagttcgtcggtctggcgggtaatggtctggccgtcaatcatatccgcgaagcgaatgaaaccgctcacttcggtcacaactggcatgatgtgcggatcccagttggcaacggtctccccgccctggacttctgcgccatcgcctttgcccattacggcaccgtaaggcactttgtagctttctttagtacgaccgaattcgtcgatcagcttcagctcggtattacgagaagtaataaccagcttacctgctgcattcataacgaacttggcgttgctcagtttcagcgtacctttgttcttaacctgaatgctggattctgctgccgcacgagatgccgcaccaccgatgtggaacgtacgcatcgtaagctgggtacccggctcaccgatggactgtgctgcaataacacccactgcttcacctttgttgatgatgtggccacgcgccaggtcacgaccatagcagtttgcacacacaccgaaatcggtttcacagcttacaactgaacgaactttaacgctgtcgacggagttttcttctaacagatcacaccatttttcgtccaacagggtgttacgcggaaccagaatatcagccgtacccggcttcaagacttcttctgcagtcacacggcctagaacgcgatcgcgcagtggctctttaacatcaccaccttcgataaccggagtcatcacgataccgttatgggtaccacaatcgtcttcggttacaaccagatcctgtgccacgtcaactaaacgacgggtcaggtaaccggagttcgcagttttcaatgcggtatccgccaaacctttacgcgcaccgtgggttgagatgaagtactgaagtacgttcaaaccttcacggaagttcgcggtgattggcgtttcaatgatcgaaccatctggcttagccatcaggccacgcataccggccagctgacgaatctgtgctgcggaaccacgcgcaccggagtcggccatcataaagatgctgttgaaggaaacttgttgctccacttcacctttactgttgatgacgtcttccacggacaagttgtccatcatagccttggcaacacgttcgttggctgcggcccagatatcgatcactttgttataacgttcgcccgcggttaccagaccagattggaactgctcctgaatctcggcaacttcggtttcagcttcttcgatgatcccagctttcgcttcagggataaccatgtcatcgatacctacagaggcgcctgaacgcgctgcgtaagcaaaaccggtgtacatgatctggtcagcaaagataaccgttggcttcaagcctaggatgcggtaacaggtgttcagcatcttggagatagcttttttgcccagcggctggttaacgatagagtaaggcaggcctttcgggacaatcatccacaaaatggcacgaccgatagtcgtatcgatgatgctggtttgcgaaacggtttcaccttccgcagtacggatttcttcagaaatacgcactttaactcgggcgtgcagagacgccaggccagcgcgataaacacgctcagcttctttcgagccattcagcaccatgccttcgcctttggcgttaacacagtcacgggtcatgtagtacagacccaatacaacgtcctgagaaggaacgatgattggctcgccgttcgcaggtgacaggatgttgttggtagacatcatcaacgcacgcgcttccagctgagcttccagcgtcaagggtacgtgaactgccatctggtcaccatcgaagtcggcgttataagccgcacaaaccagcggatgcagctgaattgctttaccttcgatcagaaccggttcaaacgcctggatacccaaacggtgaagggtgggtgcacggttcagcagcactgggtgttcgcggataacttcatccagaatatcccaaacaaccgcttcttcacgctcaaccatcttcttggcagctttgatggtggtagcaagaccacgcagttccagcttaccgtagatgaacggtttgaacagctcgagtgccattttcttcggcagaccgcactgatgcagacgcaggtatggacctacggtgataaccgaacggcctgagtagtcaacacgtttacccagcaagttctgacggaaacgaccttgcttacctttgatcatgtctgccaaagatttcaacggacgcttgttcgagccggtaattgcacgaccgcgacggccgttatccagcaatgcgtctactgcttcttgcagcatacgcttttcgttacgcacgatgatgtcaggagcagccagatccagcaggcgtttcagacggttgttacggttgatcacgcgacgatacaaatcgttcagatcggaagtcgcaaagcgaccgccatccaaaggaaccaatggacgcagatctggcggcaacacaggcagcacggtcaggatcatccactctggcttgttgccagactgtacgaacgcttccagcagcttgatacgcttggtcagcttcttacgcttggtctcagaattcgtttcgttcagttcttcgcgcaggatttcgcattcggcttccagatccatgtttttcaacaaggcctggatcgcttctgcacccattttcgcgtcaaactcatcaccaaactcttccaacgcgtccagatactgctcttcagtcaggatctgacgacgttccaggttggtcatgccgccttcgataaccacataggattcgaagtacagaacacgttcgatgtcacgcagtggcatatccagcaacaaaccgatgcgcgaaggcaaggatttcaggaaccagatgtgtgcagtcggagaagccagctcgatgtgacccatacgctcacggcgtactttggtctgagtcacttcaacgccgcatttctcacagattacaccgcggtgtttcaaacgcttgtatttaccacacaagcattcgtaatcttttactgggccaaagatacgggcgcagaaaaggccgtcacgttctggtttgaacgtacggtagttaatggtttccggctttttaacttcgccgaacgaccaggaacggatcatgtctggcgaggccagagcaattttgatcgcatcaaactcttcggtcttagtttgcgctttcagaaactttaataagtctttcacggattggctcctgtcggagttagacctgataggcgcccaaacctaggtttgagcgcccctgtgaccagtgcgtaccaccagcagactcccggctgtgagagcctgccgtctggagaagatttactcttcttccagctcgatattgatgcccagcgagcggatttctttcaacaatacgttgaaggattccggcatgcctggttccatacggtgatcgccatccacgatgtttttatacatcttggtacggccgtttacatcgtcggacttgacggtaagcatttcctgcaaggtgtacgcggcgccataagcttccaacgcccacacttccatctcaccgaagcgctgaccaccgaactgagctttaccacccagcggctgctgagtaaccaagctgtaagaaccggtagaacgcgcatgcattttgtcatcaaccaagtggttcagtttcagcatgtacatgtagccgacagtaacctggcgctcgaactgctcaccggtacggccgtcaaacaaggtaatctgaccagaagttggcaggccacccagctttaacagttccttgatttcagtctctttcgcaccatcgaagactggtgttgcgattggcataccttttttcaggttctcagccagacgcataacttcgtcatcggtaaaggtgttcaaatcaactttctgacaaacgttgtcgcccagatcgtatgctttctggatgaactcacgcagtttggcaacgtcttcctgcttcttcagcatggcgttgatcttctcgccgatacctttagctgccatccccaagtgggtttccagaatctgaccgatgttcatacgcgaaggtacgcccagcgggttcagaacgatgtctaccggcgtaccgttttcatcgtaaggcatatcttcgatcgggttgatcttggagataacacctttgttaccgtgacgacctgccatcttgtcacccggttgaatctgacgtttaacggccagatacactttaacgattttcagcacgcccggtgccagatcatcgccttgggtgattttacgacgcttggcatccatcttcttctcgaattcggatttcatttcgtcgtactgctctgccagctgttccagctggttttgcttgtcttcgtcggtcaggcccagttccaaccagcggtcacgtggcagtttgctcagcttgtcagcttcgataccaccagaaaccagcacggcgtggatacgtgcaaacaggccagcttccagaatctgcaattcttcagtcaggtctttcttagcctgcttcagctgcatttcttcgatttccaacgcgcgcttgtctttttctacgccatcgcgagtaaagacttgcacgtcgataaccgtaccggaaacgccgtttggtacacgcagagaagagtctttaacatcagacgctttctcaccgaagatcgcacgtaacagcttctcttctggagtcagctgggtttcacctttaggtgttaccttaccaaccagaatgtcgccgccggtgacttcagcaccgatatacacgataccggattcatccagtttggagagcgcagcttcacccacgttagggatgtcggcagtgatctcttcaggccccagcttggtgtcacgagacacacatgccaattcctgaatatggatagtggtgaagcgatcttcttgaaccacacgctcggagaccaagatggagtcttcgaagttgtaaccgttccaaggcatgaaggctacgcgcatgttctgacccagcgccagctcacccaggtctgttgatgggccatctgccagcacgtcgccgcgctcgattggctcaccgagattcacacacggcatctggttgatacaggtgttctggttggaacgggtgtacttagtcaggttataaatatcaatacctgcttcgcctgggtacatctcgtcttcgttaactttaatgacgatacgggatgcatctacgtactgaacggtaccgccacgtttggctacggaggttaccccggagtcaaccgctacagcacgttccataccggtaccaaccagcggcttatcagcacgcagagtaggaaccgcctgacgttgcatgttcgcacccatcaaggcgcggttggcgtcatcgtgttctaggaatggaatcagagaagcaccaacggacaccacctgctgagtggaaacgtccatatagtcaacctgatcgcggctaaacaggctggattcgcctttgctacgacaagtgactaagtcttcgatgaagcggccgtcttcgtccaggttggagttcgcctgagcgataacgaagttgccttcttcaatagcagacagatagttgatttcatcagtcaccacaccgtcacgcacgcgacgatacggagtttccaggaaaccatactcattggtctgtgcgtacacggacaaggagttgatcagaccgatgtttggaccttctggcgtttcgattggacatacacgaccgtagtgagtcggatgaacgtctcgaacttcaaagccagcacgctcacgggtcaaaccgcccgggcccaatgcagaaatacgacgcttatgcgtgatttcagacaacgggttgttctggtccataaattgggacagctggctggaaccgaagaactctttcaccgccgccgaaataggcttggcgttgatcatgtcctgaggcatcagcgtgtcgaggtcgccaagagacaaacgctctttaacagcacgctcaacgcgaaccagacctacacggaactggttttcagccatttcaccaacggaacgaatacgacggttgcctaagtggtcgatatcatccacttcgcctttaccgttacggatatcgatgagcttcttcatcacttcagtgatgtcttctttgctcaggataccggaaccttcgatctcgtcacgcagcagtgaacggttgaacttcatccggccaaccgcagacagatcgtagcggtcttcagagaagaacaggttctcaaacagattttcagctgcttcgcgagttggtggctcaccaggacgcatcatgcgatagatctcaaccagagcgcttaagcgatcgctggttgggtcaacgcgcagggtctcggagatataagcaccgtgatccaggtcattggtgaacagagtttcaatgcgtttgtgaccagcctggctcagtttcgccagcagatccagtgacagctccatgttggctgcacagatcagttcgccagtgttctcatcgatatagtctttagcgaccactttaccggcaatgtattcaaccggaacttcgatgcgatccacaccgtctttttcaagctgacggatatgacgagcggtaatacggcgagctttctcgacataaaccttgccattagcttcgatgtcaaaggaagctgtttcaccgcgcagacgctctggaaccagctccatctgcagcttgttatcacgaatttcgaacacaactttatcaaagaacaggtcaaggatctgttcagtggtaaagttcaatgcacgcagaatgatggtcgcaggtaatttacggcgacggtcaatacgcacaaagaggttatctttcgggtcaaactcgaaatctaaccatgaaccgcgataagggataatacgtgcgttatacagcactttacccgatgaatgggttttacccttatcactgtcaaagaatacaccaggactacggtgaagctgagatacgataaccctctcagtaccgttaatcacaaaggtaccattctcggtcatgagtggaatttcacccatgtagacttcttgttccttgatgtctttaaccgtaccttcaggagcttcccgctcatagataaccagacgcagcttaacgcgcagcggtgctgaatacgtcacgccacggatctggcactctttgacgtcaaacactggctcaccaagacggtagctaacgtattgcagctccgaattgccactgtagctctggattggaaaaacagaacggaatgccgcttctaggccgtgctgtccttctggatcttgctcgataaatttctggaacgagtcaagttggatagaaaggagataaggtatgtccaaaacttgtggacgtttaccaaaatccttacgaatacgttttttctcggtataggagtaaaccatagggttcctcagctcgctgatcagtgacccactctgtccgtcctaaaggacagttcattcaacactattttctcgatcggaaagtcgaaacactttccgtaatacctcgttctatcactcttaaaccatttcatcgcgttaccttgactaccgagctacccgagtgggtcgtagctgagaacgcagtatattaagtcgtcgatagaaagaaatattggggttagtcagtatctaaacagtgtgaaactccactgacgccctacagcgcaaaaaggctggtgactaaaagtcaccagccatcagcctataacttaggctgcacagttgaaattaaatttatttaatttcaacttctgcaccagcttcttccagtgcttttttcagtgcttcagcgtcgtctttgctcacgccttctttcagagcagctggcgctgactcagtcagatctttagcttctttcaagcccaggccagttgcgccacgtacagctttgattaccgcaactttgttagcgccgattgctttcaagataacgtcgaattcagttttctcttctacaacttcagcagcagcagcaggacctgcagcaacagcagcagctgaaacgccgaatttctcttccatagcggagatcagttcaacgatttccattacagacagagctgcaacgccttccagaatttggtctttagtgatagttgacataacaagtgttcctaaaatacagaaatagtttatacgttaaaaagcagtgtcggaaaaaacagagggcgattaagccgcttcagcttctttctgatcacgcagcgcagccaaagtgcgaaccaatttgccagcagcggcttctttcatggttcccatcagacgtgcgattgcttcttcgtaggtcggcagagttgccaggcggtcgatttgagccgcagggattaactcgccttcaaaggctgctgctttaacctcgaattttgcattcgctttcgcgaaatctttgaacaaacgagcagctgcgcccgggtgttcactagaaaatgcaatcaaggttggaccaacaaacgtgtctttcaggcactcgaatggagtaccttcaactgcgcgtgacagcaaggtgttacgaacaacttgcatgtgaacgccagcttcacgacctgctttacgcagttcagtcattttatcaacggttacgccacgggaatccgcaacaaccgcagacagcgcacctttggctacttctttaacttcagcaacaatcgcttgtttgccttgaagatttagtgccattagttcttgctcctggattaaccggagaataattccccggaactcacatcacccaattacgacaacaatgtcattaacgggcgttgaaacacggtgagcagaatccagcaaagacaattctttaattaaaaagaaaaaatttctttaggctctgtcaccgtctacgcaggaaattaagtcctttgcagaacacctgcggtcttggacggaggcttggataggccaagctccaaccgaaaaattctgttgttcacatggtacggttaaaccgtagtcaatagaaccatgggcgtaagattctagacaaacctaacgcccacgtaaagcgataaaagcaaatagtgattagttcactactgcagtcaggccgctttgatcaatagcaacgccggcgcccatggtggtggacaggctgattttcttgatgtaaacgcctttcgctgtagcaggcttagccttcttcagcgcaactaccagggattccaagttttctttcagcttgtcagcgtcaaagtcaactttaccgatggtagtgtggataataccgtttttgtcgttgcgataacgaacctgacctgctttagcattcttaactgcttcagcaacgttaggagtaacggtacccactttcgggtttggcatcaggccacgtgggcccaagatttggcccaattgaccaacaacgcgcattgcatctggagatgcgattacgacgtcgaagttcatttcgcctttcttgatttgatcagccaggtcgtccatacctaccagctcagcaccagcttcttttgctgcttcggcgttggcgccttgagcaaatacagcgacgcgaacagaacggccggtaccgtgtggcaatacagttgcgccacggacgttttgatcagatttacgagcgtcgataccgaggttaacggcaacgtcaacgctttctacgaatttagcagtagccagctctttcagcagggcaacagcttcgttgatatcgtattgcttagtcacatcaactttgtcacggatcacgcgcatgcgcttggtcagcttagccatttattaaccctccactaccaggcccatggaacgagcagtaccttcgatagaacgcatcatagcgtctacgtcagcaccagtcatatccgcagctttggtttctgcgatttcacggacctgagcaacggtcactttacctactttgtctttgttcggcttgccggaaccagacttaatacctgccgcttttttcagcagaactgctgctggcggggttttagtaacgaaagtgaaagagcgatcagaataaacagtaataacaacagggatcggcaggcctttctcaatgctttcagtcttagcattgaacgctttacagaattccatgatgttaacaccctgctgacccagtgctgggccaaccggaggacttgggttcgccataccagctgctacttgcagcttgacataggcttgtactttcttagccatttacgatttcctcgatttgggtagtatcgcctcgttgtgaggctccccgtgttttgcctcgcaaagtcggaagactgagccagacatctaaaaacaaaaggcgcgaaattatagtgtaatttcacgcctgatacaagactcaaagttcaaccggtggtgaaaattgaatcagcctttctcgacctggctgaagtccagctcgaccggtgttgcacggccaaagatggaaacagacactttcaagcggctcttttcgtagtccacttcttcaacaacgccgttgaagtctgcgaacggaccatcgctaacgcggaccagttcacctggttcgaacagtgttttaggacgtggtttatcacccacttgttgaagacgattcattatcgcatcaacttctttatcactgatcggcgcagggcgatcggaagtaccaccgataaagcccatcacacgcggtacgctacgcactaagtgccagcttgcgtcattcatgaccatctggaccagaacgtagcctgggaagaacttgcgttcactcttacgacgcaggccgccacgaatttccacgacttcttccgtcggaaccatgacttcgccgaatagctcttccatgccctgtaatttgatatgctcacgcagcgattgagctacgcggccttcaaaaccggaaaacgcctgaacgacgtaccaacgcttttttggtgcttcagacatcttagaacctcaggccagtaataaacgatactaagcgaaccaggataccatccagtccccacaaaatcagtgacatcacggcagtaaccgcggcaacgattaacgtggtgtgtagcgtttcctggcgagtaggccaaatcactttacgcacttccgtgcgtgcttcgcgagcaaacgctactgtggctttgcctttaaccgtcatcagcgcaacagcaccggcaacagcgataattacaacaactgccagcgcgcgcagtggaagactgaaatctcggtaataataattgccaacaattgccgcaaccaataagacggcaacaactagccatttaaccgcttccaggccgcgcccgctcccttgagcctcggtattcgcactcataaaccaacctgtcactatgattcagaacaaacaactttgcctcgcgtagcgaagcaaaccaaaccgaaagatgctctagatttccggcaccattcagcactatccgccgtactgacagagcccatctcaccaataattatgagtctaaaaccactgatgagataggttctggtgtcacaacgtagaaaaagggcatcaaatgatgcccttttaccgcatgtcgcgtcaaatcttattcaataactttagcgacaacgccagcacctacagtacgaccaccttcacggattgcgaaacgcaggccgtcgtccatagcgattggcgcaatcaggtttacaatcatttgaatgttatcacctggcattaccatttccacgccttctggcagttcaatggtaccggtcacgtcagtagtacggaagtagaactgaggacggtaacctttgaagaatggcgtatgacgcccaccttcatctttgctcagaatataaacttctgattcaaacttggtgtgtggcttgatagaacctggcttagccagaacctgcccacgctgtacgtcatcacgtttagtaccacgcagcagaacgccaacgttttcaccggcacggccttcgtccagcagcttgcggaacatttcaacgccggtgcacgtggttttgatggtatcgatgataccaacgatctcaacttcttcacccactctgacgataccgcgctcaacacgaccggtaacaacggtaccacggccagaaatagagaacacatcttcaattggcagcaggaacggcttatcaattgcacgctcaggctgtggaatgtagctgtccagtgcttcagccagttcaataattttggcttcccactctggttcgccttccaacgctctcagcgcggaaccacgaataaccggagtgtcatcgcctgggaaatcgtattgagacagaagctcacgcacttccatctcaaccaattccagcaattcttcatcatcaaccatgtcacatttgttcaggaagacgagaatgtaaggaacgcccacctgacgacccagcaggatgtgctcgcgagtttgtggcattgggccatcggtcgcagcaacaaccagaatcgcaccgtccatctgagcagcaccggtgatcatgtttttcacatagtcagcatggcctgggcaatcaacgtgcgcataatggcgagacggggtgtcatattcaacgtgcgaagtattgatggtgatgccacgcgccttttcttctggcgcgttatcgatctggtcaaacgcacgggcattaccaccgtaagttttggccagtacgctggtgattgcagcagtcagggtagttttaccgtggtcaacgtggccgatagtacccacgtttacgtgcggttttgtacgttcaaacttttctttagacatcgattgtccctctaagacacggaatcggtggtttcaccacatcaaccaagcaaaatgcttgctgaatccatagcgcagaaagaagatcaagggagcgagagaaagaagaagtggtgctgataggcagattcgaactgccgacctcacccttaccaagggtgcgctctaccaactgagctatatcagcacatcttggagcgggcagcgggaatcgaacccgcatcatcagcttggaaggctgaggtaatagccattatacgatgcccgcatcctggaactcggctacctgacttatctgcagaatctaaaaggaagggcgtggcctcttcactcttggaaggttttcaccttccctttacttgccaggcaggttttcattttcctgaatcaccttggcacataaagttgaatatggtggtggaataaggattattcatcacttcgttcctcacccttcgggccgccgctttgcgttgttgtcttgcttcgctcggctcgaactttgtcgaaggttttcaccttcccctcaagcgcttatctcgattcattacttcgaatcacctaaggctcaaggttaaatatggtggtgggggaaggattcgaaccttcgaagtcgatgacggcagatttacagtctgctccctttggccgctcgggaaccccacctaattgtaagtacttgaatggtgccggcaccaagagtcgaactcgggacctactgattacaagtcagttgctctaccaactgagctatgccggcatcaagtgcagcgcattctaggtagaccagacttgcgatgcaacaaaaaaatcgcttaattcgctctatcgctcataaaataaacagatttgcgcgctgtgacgtattatccagcaatgtacgttcaaatattattcgtaacggcttaacttgtcacccttgaattgccgattttaaaaacagatcacaacggaccattcgcaccaatttgtgtcacgcagcctcattcaagtgcatacaaagtatcagattaaaataaatacccataagccgcggtaagttcgcattggcgtaattcttgctttctcagcatcaatacattggttttttctgtttatcgtccaatgcttacttaccaatgaggtatacccaatgaaaatcgttttgttaaacgcagcgactctacctatttatcgcaatgaattggcgcttctattgattgatgcggtcacccatggcgcatctattggttatagctctcaacatttaccagctgaagaagcagaacagtattttcatagcttgcgtcctgccattgccaccagagagttaatgctgtggattgcccgtgatgaatcaggcgttattggcactgtccaactaagtttatgccagaaggacaacggtcttaatcgagcagaagtgcagaagcttttggtacacagtcgctgccggcgagtgggcattggacaaaaattgatgcatgaggttgaagaaacggcataccaacttcaccgcggtttgctttatctagatacgcaaacaggttcatctgctgaatcattttataaagcgcagggataccgttgcataggtgaaatccctgactatgcctgtacaccaagcggtagctaccacccaacgtcgatttattacaagcggctatttgcggcaaatcagtcatatagttcaattgtcggccaaattgcgcatcccagtggggtgaaaaatatccacggtgccataaacagtcttaattgatcggaataccaacatacgtcaaagaaatcgctcgccacgaacaaaaaactctacgccaaaaaccaagctgcctataatatgcagcttgtttcttatctggagttggcgtccagcgcctttcccaacctgcgtttacaggcagaatttggcttatgacaaaaagagagcaatctttagcgacgccttacctacagttcgatcgcacacagtgggcggccctacgcgactcagtgcctttgacgctgacagaagaagaaatcgttaatcttaaagggataaacgaagacctctcattggaagaagtggcacagatctacctacccttgtcccgtctcctcaatttctatatcagttctaatttgcgtcgtcaggcggtattagagcagtttttaggaaccgatgggcaacgtattccttatattattggtatcgcaggtagcgttgccgtcggcaaaagcacaacggcgcgtctgttgcaggcattgctaagccgttggccagagcatcgcagcgttgaactgatcaccactgatggtttccttcacccaaataaagtattaaatgaacgcgggttaatgaagaagaaaggtttcccgcaatcttatgatatgcataatttggtgaaattcgtttccgaggttaagtctggagccagcgaggttacagctcccgtctattctcatctgatttatgatgttgtccctgatggaaataaaactattaagcaacctgacattcttattttagaaggtctgaatgtgttgcagagcggcatggattatccacacgatcctcatcatgtatttgtttctgacttcgtcgatttctcaatatatgtcgatgcgccagaggaattactgcaaaactggtatataaaccgttttcttaaattccgacaaggtgcattctctaaccctaattcttatttccataactatgcacagttgcctgaaaccgaggctatcaagattgccactcagctttggaaagagattaacggactgaatttaaagcaaaatatactaccaacgcgtgagcgcgccagtttaataatgactaaaagcgctaaccacgcagtagaaagcgtccggttgagaaaataaatttaatagggaggctaagtctccctatttattatggattaactccgcgaagagatatttctccaccgatgtaaggcttcacatcaccgtcttgttccagcaataaaccgccttgctgatctattcctctggcaatgccgaatatctcttggttaccgataatcaatttaactggccggtctaaataattatccaactctcgccaacgagaaataaatgcccctaaaccttcattttcgaacttaataaccgcgcgacgtaattcactcaataactcagcggtgagtttattgcgatcgatagaaacgccggcctcttgtaaattaatccaatcctggctaataacgttattcgatgattctcgcatcgataaattaattccggcgccaataactaactgggcagcgtccccggtttttcctgttaactcaactaatataccggctaattttttatcgtttaagtataagtcgttgggccatttgaccttcacatccgccgcacctagctttctcaatacttcggccatcacaatgccgactaccagacttaaccccattgcggcagcgggtccctgctctaggcgccaaaacatggagagataaaggttagccccaaatggtgaaacccaatgacgcccacgtcgccctcttccggcctgctgatattcggccacacaggcatcgcctgactggagttcattaattcgatcaagaagatattggtttgtcgaatcaacgaccggcaaaacactgactttcccttcgggtaaataagtggctatcgcatctgcattcagcaactgaataggttcaggcaggctgtaacctttccccggaacggtaaatacatccaaaccccattcgcgaatggtctgaacatgtttattaattgcggcgcggctcatgcccagagtttcccccagttgctcacccgaatggaatgcgccatcagctaacatgccaatcagtcttaaaggaacggtagtatctttcacgacaagctctccacggcattaacttcgcccgaagccgcaataaaacgcacttcaggttcgagccaaacggcaaatttaagcgcaacctgttggcgtacatggctggcgagatcgacgatatcctggcttgatgcatcatccaggttaataagaaccagagcttgctgctgatgcaccgcagcgccgccaattcggtgtcctttcaatgaacattggtcaatcaaccaaccggcagcaagttttaccgagttatcagcctgaggataatgtggagcagtaggataggttcggagtatttccgcggccttttctgcgctgactataggatttttgaagaaactacctgcattacccgtcacattaggatctggcagtttactccgccgcattgcgcataccgagtcaaaaatctcacgagcagtgaccgtcgacggatttaaacgagttaaatcaccgtaacctagggtaggcttccagtccttattcagcttgatgccgacagcaacaatggcaaagccttcaccatagcgatgcttgaaaatgctatctctatagccaaaagcacagtcttcagccaaaaggcgtcgaacttcgccagtattcaaatcgagcaaatcgacgtattcacagactttttgtagctcgacaccgtaagcaccaatattttgaatcggtgcggagccaacgcatcccggaattaacgccagattttctaaccctgccatttgctgctgtaatgaatagcacacaagttgatgccagttttcacccgcgccaacgtgcagataccatgcggtatcatcttctctacactgaatgcccttaatcctatttaacagtaccgtaccggagaagtcttcaataaacagtacgttacttcctttccctaatagcaacactggctgatttgacgctttagcttcattccaggcagcagttagcgcagaaacagactctacgctcaccacctgggttgcatatgcggaaagagcaaaggtattaaggtttttcaggggcgcggcaggggtcaacatagcttgtaatactcactctaactaaactgtatctagtctaaccgatcggaatactcaggttgtaacttgtttacatcagagggtgaaaaatatatttatttaattaatagcctaatagatagagctgaaaaatggatgcttttcgcccaatttgagttctgcgatctggtagctttgctgattttacatccgaaaatacccattaatgaggatgagtttccgataaaaccgacctggttcgttggttacatggctttttaataaaatataagcccggtgagtgactgtatctgcctgaaaatgctgcgaatttactgcctgaaaacgtcaacggcggcgcaatttaccggataagccgccccttatggaatgaaaatcgccatatacgccttcaacgcccgacattcccgggggttcccatgcccttaaacgcaaaaagccccccgcaatcgcaggaggctcggttcgagggcggcaatgacttttatccgcctcgcgtctgtcttttttccatagcaaaaaccccacgcttttggcatggggtcttggcttgatttgatgcctggcagtgtcctactctcgcatggggagaccccacactaccatcggcgctacggcgtttcacttctgagttcggcatgggatcaggtgggaccaccgcgctattgccgccaggcaaattctgtttcaatcaacccgccacgtgatttacaccacacagccagtcaatccaatctgttaacaatgctgaaaatcaaaacgctctctaaaacaccttcggtgttgtaaggttaagcctcacggatcattagtactggttagctcaatgcatcgctgcacttacacacccagcctatcaacgtcatagtctttaacgttccttcagggggcatgaagccccagggaagactcatcttgaggcaagtttcgcgcttagatgctttcagcgcttatcttttccgcatttagctaccgggcaatgccattggcatgacaacccgaacaccagtgatgcgtccactccggtcctctcgtactaggagcagcccctctcaatcttccaacgcccacggcagatagggaccgaactgtctcacgacgttctaaacccagctcgcgtaccactttaaatggcgaacagccatacccttgggacctacttcagccccaggatgtgatgagccgacatcgaggtgccaaacaccgccgtcgatatgaactcttgggcggtatcagcctgttatccccggagtaccttttatccgttgagcgatggcccttccattcagaaccaccggatcactaagacctactttcgtacctgctcgagccgtcactctcgcagtcaagctagcttatgcctttgcactaacctcacgatgtccgaccgtgattagctaaccttcgtgctcctccgttactctttgggaggagaccgccccagtcaaactacccaccagacactgtcctcaccccagattatggggccgagttagaacatcaaacattaaagggtggtatttcaaggttggctccacgcagactggcgtccacgcttcgatgcctcccacctatcctacacatcaaggctcaatgttcagtgtcaagctatagtaaaggttcacggggtctttccgtcttgccgcgggtacactgcatcttcacagcgagttcaatttcactgagtctcgggtggagacagcctggccatcattacgccattcgtgcaggtcggaacttacccgacaaggaatttcgctaccttaggaccgttatagttacggccgccgtttactggggcttcgatcaagagcttcgccttgcggctgaccccatcaattaaccttccagcaccgggcaggcgtcacaccgtatacgtccactttcgtgtttgcacagtgctgtgtttttattaaacagttgcagccagctggtatctgcgactggcttcagctccgagagcaagtctcttcacctagcgccagcgtgccttctcccgaagttacggcaccattttgcctagttccttcacccgagttctctcaagcgcctgagtattctctacctgaccacctgtgtcggtttggggtacgattcaatgttacctgatgcttagaggcttttcctggaagcttggcatcaactacttctgcaccgtggtgcatcgtcatcacgcctcagggttgatggttttccggatttaccaggaacacccccctacacgcttaaaccgggacaaccgtcgcccggctagcctagccttctccgtccccccttcgcagtaacaccaagtacaggaatattaacctgtttcccatcgactacgcttttcagcctcgccttaggggtcgactcaccctgccccgattaacgttggacaggaacccttggtcttccggcgtgcgggtttttcacccgcattatcgttacttatgtcagcattcgcacttctgatacctccagcagtcctcacagactaccttcaacggcttacagaacgctcccctacccaacaacacctaagtgtcgttgccgcagcttcggtgcatggtttagccccgttacatcttccgcgcaggccgactcgaccagtgagctattacgctttctttaaatgatggctgcttctaagccaacatcctggctgtctatgccttcccacatcgtttcccacttaaccatgactttgggaccttagctggcggtctgggttgtttccctcttcacgacggacgttagcacccgccgtgtgtctcccgtgataacattcttcggtattcggagtttgcatcggtttggtaatccgggatggacccctagccgaaacagtgctctacccccgaagatgagttcacgaggcgctacctaaatagctttcggggagaaccagctatctcccggtttgattggcctttcacccccagccacaagtcatccgctaatttttcaacattagtcggttcggtcctccagttagtgttacccaaccttcaacctgcccatggctagatcaccgggtttcgggtctataccttgcaactagacgcccagttaagactcggtttccctacggctcccctatacggttaaccttgctacaaaatataagtcgctgacccattatacaaaaggtacgcagtcacaccacgaaggtgctcccactgcttgtacgtacacggtttcaggttctatttcactcccctcgccggggttcttttcgcctttccctcacggtactggttcactatcggtcagtcaggagtatttagccttggaggatggtccccccatattcagacaggatgtcacgtgtcccgccctactcatcgagttcacagcatgtgcatttttgtgtacgggactatcaccctgtaccgtgcgactttccagacgcttccactaacacacaaactgattcagactctgggctcctccccgttcgctcgccgctactaggggaatctcggttgatttcttttcctcggggtacttagatgtttcagttcccccggttcgcctcgttagactatgtattcatctaacgatagtgcaacgaattgcactgggtttccccattcgggtatcgtcggttgtaacgcttcatatcagcttaccgacgcttttcgcagattagcacgcccttcatcgcctctgactgcctaggcatccaccgtgtacgcttagtcgcttaacctcacaacccgaaggtgtctttcgacatcatcgtgctgcgattattgagagactctacctgcagatgactccttgtctcggtaaatctacggagagacaagttttagctgcagtgtttcaattttcagcttgttccagattgttaaagagcaatatcttaaacacgactcgttaaagtcatctttaagatattcagttgataatgtctttcactcattatcggatggcgtccccaaggggattcgaacccctgttaccgccgtgaaagggcggtgtcctaggcctctagacgatggggacacaggaaattccgactaaatcaaaaacttaatcgtttctcgtgtcatcatgagtcgaaactcacgacatcaacaggtgctcttgctcattactattatcagacaatctgtgtggacacggcgcaatgcgtatcattaggtaaggaggtgatccaaccgcaggttcccccacggttaccttgttacgacttcaccccagtcatgaatcacaaagtggtaagcgccctcccgaaggttaagctacctacttcttttgcaacccactccccatggtgtgacgggcggtgtgtacaaggcccgggaacgtattcaccgtagcattctgatctacgattactagcgattccgacttcatggagtcgagttgcagactccaatccggactacgacagactttatgtggtccgcttgctctcgcgagttcgcttcactttgtatctgccattgtagcacgtgtgtagccctactcgtaagggccatgatgacttgacgtcatccccaccttcctccggtttatcaccggcagtctcccttgagttcccaccatgacgtgctggcaacaaaggataagggttgcgctcgttgcgggacttaacccaacatttcacaacacgagctgacgacagccatgcagcacctgtctcacagttcccgaaggcaccgaagcatctctgctacgttctgtggatgtcaagagtaggtaaggttcttcgcgttgcatcgaattaaaccacatgctccaccgcttgtgcgggcccccgtcaattcatttgagttttaaccttgcggccgtactccccaggcggtcgacttaacgcgttagctccggaagccacgcctcaagggcacaacctccaagtcgacatcgtttacagcgtggactaccagggtatctaatcctgtttgctccccacgctttcgcacctgagcgtcagtctttgtccagggggccgccttcgccaccggtattcctccagatctctacgcatttcaccgctacacctggaattctacccccctctacaagactctagcttgccagtttcaaatgcagttcccaagttaagctcggggatttcacatctgacttaacaaaccgcctgcgtgcgctttacgcccagtaattccgattaacgcttgcaccctccgtattaccgcggctgctggcacggagttagccggtgcttcttctgcgagtaacgtcaatcacttcacgtattaggtgaaatgccttcctcctcgctgaaagtgctttacaacctgaaggccttcttcacacacgcggtatggctgcatcaggcttgcgcccattgtgcaatattccccactgctgcctcccgtaggagtctggaccgtgtctcagttccagtgtggctggtcatcctctcagaccagctagggatcgtcgcctaggtgagccattacctcacctactagctaatcccatctgggcacatccgatggcgtgaggccctaaggtcccccactttgctcttgcgaggttatgcggtattagctaccgtttccagtagttatccccctccatcaggcagtttcccagacattactcacccgtccgccgctcgccggcaaagtagcaagctactttccgctgccgctcgacttgcatgtgttaggcctgccgccagcgttcaatctgagccatgatcaaactcttcaatttaagatttgtttgatttgctaccgaagtagcgatgctcaaagattactttctgcaaatatgcattcgaaccgaagttcaaatgtttactgctttggtcactcttcaagacttgatatttcttctgcctgccgaaacaggctttgatatcgtcttgcgagtgcccacacagattgtctgataaattgttaaagagcgttcgttacccgttcgcttgtggcgaatcttacggtaacgcgggaggcagataatacgctttcccgctgaagtgtcaagcttttcttttcaactttcgttttaagaaccggcgtttccgcctgcttaacacttcctgacccggcgaagtttgtttcgttgttcccggtcagtggaggcgcattatagggagttcctgacaggctgcaacccctaatttcaaataattttccaaccggcttttttttcaacgaattgcggcgagaatcatcatttttgctattttttatactgcatttgcgagaattcacgggcgaaactgcttacctgctgccaatcggtgtattccacttctttactggtatctgtttctccgccggtcatgcgcataataagttgaatcatgacccgatcaaaccagcgatagcgtggataacgcagcgctccagcgaagacgccgcagagtgtcggctgccaaggcgagcttgccaggaacttacgcacataagaattggtttggggcgtgcgcttctccggtttgcgcgccgtcaggttcacggcaaagaaagcgctcggcatagtattcaattgttccaggtgttgggtgatgaacttcgtcagcactttatcgaagtgcccataacgaatagaagctccgatcatgacctgttggtactgcccgagatcgatattccctactaatgccagatcctgtacgtcacaattgaccatcgcggataattcattagccatataagaagaaatagcctgagtttgcccatcacggctggagtaaagtatcaatgccttcataactactttttcctaattcaaagttactcgcgccagaatgttggcgtaaacagtaccagtagggtgaatacttccaatcgaccaaacaacatggttatcaccagtatccatttagctgcggcattcattgaggtgaagttatctgctaccacccccaagcccggcccaaggttattcagcgtcgcagtgacggcagcaaaagcagaaaactcatccacaccggtagcaatgatcgccaacatactaatgatgaacaccagtgcgtaagcagagaagaatccccagaccgcttccagaatacgttccggtagcgcacgacgccccagtttgatggtgtaaaccgcgttcgggtgaaccaaccgctttaattctcgcgaaccctgcagatacagtaaaaggatacgaatcactttaaggccaccgccggttgaacctgcacaaccgccgataaaagcggaacataatagaaggataggaaggaatagcggccatttggcaatgctatcggtagtaaagcccgcggtcgtggccatagataccacttggaaaaacgcctgattcagagtttccagaccggatttgtacacgctgtgctgccacaaaaccaaagtacaaacgactaccagcgtcagttgtacaaagataaacatccggaattcgggatcgcgccaatacactttcaggctgcgcccgctcagtacggcaaagtgcaggccgaagttacaccccgagatcagcaagaagatggcaatgatagtgttaatcgttgggctggcgaaataaccgatactggcgtcatgagttgagaaaccgccaatagctatagttgagaaactatgcgaaatcgcatcgaacaccgacatccccgccccccacagggaaagcgcgcaggcaatggtgaggagcacataaataagccacagggtttttgccgtttccgcaattcgcggtcgcattttattatctttcaacggccccggcatttctgcccgatacagctgcattcccccgacgcccaatatgggcaaaatcgctacggccaacacgatgattcccattccccccagccattgcagcatttgccgatagaacagaatggccttgggtaaagaatccaacccgaccagcgtagtagcgccggtcgttgtcaggccggaaaacgattcgaaaaaggcatcggtaaccgaaaggttgggtcgctcagaaaaaagaaacggcaaagccccgacgctgcccagcaccgtccagaacagaaccacaatcaaaaagccctcgcgaggcttcagttcatgtttctgtttacggttgggaagccagagaaacaggccaatcaccagggcaacaaagaaggtttgactgaaggcacgaccggcaccatcacgatagatcaacgccaccagtccgggaataaacatagttccggagaataagatgaccagcagaccaacaatacgggttatggcacgaaaatgcattccggcacgttccttagcaattcattggatggggattattgcgaaatgggcgtcaattgcaacgaaccacgactcagatcgcgtaatttctccccgacctgactggcctgagtcgccggtaaagagagacggagattgacctgcgcgccataattaccctgtaaaatctgaccatcaacctgttgtagcagtgattccaccatcgccaactgcgcgtaatcacataacaaagtatattccacctgcggcactttatactttacttcgatttgtttcagcgcttgctgcactccgctgccgtaggctttgaccagcccgccggtgcccagttttatgccgccgtagtagcgaacgaccactgcggttatttcaccgatatgactccccatcagctgtgccagtatgggtttacccgcggttcccgatggctcgccgtcgtccgaaaaccctagctgctgagaatctgtcggtgcgccagcgacaaaagcccagcaatgatgccgggccgttgggtgctcttcttttatctgctgaataaatgctttggcttcattcactccgttggtatgtgccagcagagtgataaaacgacttttcttgatttcttcagtgacgctgacggaagccgccggaataagaaaaggctgcattaagccagattcagatcgcgcgtcatattctcaacccgcttttcatggataacgatattgtcttcaatacggatgccgccataaggtttcatcgcatcaatacgttcccaattaaaatgcttgctgaactcgccgctacgccaaggtgccaatagtgactcaatgaagtagatacccggctcgatggttaataccatgcgcggttcgagaattcgggtgcaacgcagatacggatacttcgacggtgcagccagatggctacctgtatcatcctgcataaaaccagccgaatcatgtacctgtagacctaacggatgacccaagccgtgtggcaggaatgggcaggtcaaaccttgttcgaccatcgcttcttcactgatatccaccactaatttatgggtgcgtaacagtttggccaaacgttgatgcatttgcagatggtaatcggtatagcgcacgccgcttttaatggtgccaatcagcgccagttgttcggcattcagatctttgattaacgccgcaaaatcgcttttgccgttcgccgcataggttcgggtcaaatctgccgcatagccgttgtattccgcgccagcatccatcaaaaaactgcgcatttcggccggtggttgatgctgcaatttggtgtaatgcagcaccgcagcatgctcgttcagcgcaacgatgttgtcataagggacatcggtatcgcgatgaccggtagccatcagataggccagattgatatcaaactcgctcatgccagacagaaaagcttcgtgagcggcgcgatgcccaactaccgcagttttttgcgcttcacgcatacaagcaagttcatagtcggttttatacgaacgatgatagtggaggtaatccaacaccggcttcggattgatattttccatcgagatacccaagccacgagcacgctcctgcgcatagccaatataggcaactcgttgacgctgttgtggtaataaaccagcgatatcatccgctttagttaacgggaatatttcgatggatttggtccagaagctatcaggcaaaggttccacgcagtgccagtaatccaccggtgaatagaaccataattttggcgtattaacaccatcgacccataaccagcagttcggtacttcagtcaccggcacccaagctttaaactgcgcgtttgccttaaacggataatcgcggtcatcaaggaaaatgcgctgcaactccccggaatgaatcagtaaagcatcaagctgattgcgctctaatacttcacgcgtgcgttgctgtagcgtggataaatgttcgttatataaagaagccagcgtttccatcaaagtaccctttgccattagaacttcaggttttttatcttatcacagtcatcggagccgtgttttatctacgcttaaccgtgggattgcccactaaatccttaataatcattacttatagctagattcgcggggaaaaatctcgtggaaattacgtcattatattatcgatgacagcaggatatcgttcaaacttagctgccaatgaaataattaaccagcatataaaacaacaataaatattatatatatcaatgtattcaccaaacctttgtgatccttgctgcaaaaaaacaaactcttatttgcatttatttaacaaaaaaaccacacttcctgaatatctggtcataccagatcacatgcgcttattcaggagatagatatgctctaccaaagcgaaacgctacagctgcactggcttgaaaacggtattgccgagttggtgttcgatgcacctggctctgtcaataaactagataccaaaaccgtggccagtttaggggaagccctaggcgtgctggaaaaacaaactgaactcaaagggttgctgctacgttccaataaagcagcctttattgtcggtgcggatatcaccgaatttctctctctgtttaatgccccgccggaaaaactgcatgaatggctggtttttgccaacaacacctttaaccgactggaagacttgccggttccgacgctgtccgcgatcacaggctatgcgttaggcggtggctgcgagtgcgtgttagccactgattttcgtatcgcttccccagaggctcgcatcggtttgcctgaaaccaaactgggcatcatgcctggctttggaggctccgtgcgtttaccgcgcctgttgggagccgatggcgcattagaaattattgcagcaggtaaagatgttaacgcagccgaagcgttgaaaattgggctggttgatgccgtagtcactcaggaaaaactgattccggccgcattgagcatgttgaatcaggcaattgcaggcaagttagactggcaggccgctcgtcgtcctaagctggaaccgctgaaactgaattcaaccgaagccgccatgtgcttcaccatcgccaaaggcatggtaatgaaagtggcaggcaaacattatccggcgccaattaccgcagtaaagaccattgaagccgcagccaaatttggtcgtgaagaagcgctgaagctggaaaccaacagctttgtgccactggctggttcggatgtagcccgcgcattggtgagtatcttcctcaatgaccaatacgtaaaaggcaaagcgaaaaagctgactaaaggcattactgcgccaaaacaggctgcggtattgggtgcaggaattatgggcggcggcatcgcttatcaatctgcgctaaaaggcgtgccggtcatcatgaaagatatcagcgaaaaatcgctggatctgggaatgaacgaagcagccaagttgctgaataaacaactggaacgcggcaagctagatggtttaaaaatggcgaagacgctcgcaaccattcacccaacgctggattatgccggtattgaacgcgcgcagattatcgttgaggcagtagtcgagaatcctaaagttaaggccgccgttttaagtgaagtggaaggacttatcggagaagagactgtcctcgcttcgaatacctcgaccattcctattaatgaactggctaaatcacttaagcggccggaaaacttctgcggtatgcatttcttcaacccggttcaccggatgccgttggtagaaattatccgtggcgagaagacttcggaaaaaactattgcgaccgtagtggcctatgccacccaaatggggaaaaccccgattgtcgtcaatgattgcccaggtttcttcgttaaccgcgtattgttcccgtatttatacggtttcggcatgctggtacgcgacggcgtagatttccgtcagattgataaagtcatggagaaacagttcggctggccgatgggccctgcttatcttcttgatgtggtagggattgatactgctcatcatgctcaagccgttatggcgctcggtttccctgaacgcatgggcaaagattaccgcgatgccatcgatgtactgtttgaaaaccagcgttacggtcagaaaaacggtattggtttctatcgctacacgcaggatgccaaaggcaaaccgcgtaaagaaaacgatgatgctatcgacgggttgctggctccggtcagccagccacgccacactctcagcgacgaagagatcatcgcccgagcgatgatcccaatgattaacgaagtggtgcgttgcctggaagaaggcattattgccagcccggccgaaggggatatggcgctggtgtacggccttggtttccctccgttccacggcggcgtgttccgctatctggacactctgggcaccactaaatatgtggaaatggcgcagcgttatgccgatttgggtgcgctttaccacgtacccgccgggctgagagccaaagccgagcgtaacgaaacctattatcccgtagcggcaacgctgcctgatatctccactgaccaaccggcatgaggtctgaaaaaatggaaaacgtagtcattattgacgccgtccgtactccgatgggtcgctccaagggcggcgcattccgtaacgtacgcgccgaagatctttctgcccatttgatgcgcgcagtgttaagccgcaacccagcgctgaatgccggtgaaatcgacgacatttattggggatgtgtgcaacaaacgctggagcaaggcttcaacatcgctcgtaacgcttctttactggcagaaattccacacaatgtggccgcagttaccgttaaccgtctgtgtggttcatccatgcaggctctccatgacggcgcgcgcgctattatggtcggtgatgcgcaaatctgtctgattggcggcgtggaacatatgggtcacgttccaatgaatcacggcgttgatttccatccaggaatgggtcgttcagtggctaaagcagccggaatgatgggcttaaccgctgaaatgctggcaaaaattcaccagattagccgtgaagatcaggatcaattcgccgtgcgctctcaccagcgcgctgaggcagcgacgcgctctggcgcattcgccaaagagattgttccaaccaatggccacgatgccgacggcgtattaaaacgttttgattacgatgaagtgattcgtccagaaaccaatctcgccagtctggctggcctacgtccggcgttcgatccggtcaatggtacggtgacagcgggttcttcgtcagcattatcagacggcgcttcagccatgctgattatgagcgaatcacgcgccaaatcgctgggattaaagccacgcgctcgtattcgctccatggccgttgtcggctgcgatccgtccattatgggttacggcccggtgccagccagtcaactggcattgaaacgcgcaggtttacgcattcaggatatcgatttgtttgaactgaacgaagctttcgccgctcaggcactgtcctgcgtgaaggggctgggtctacgggaaagtatggatgacaaagtgaacctgaacggtggcgcaatcgctctgggccatccattgggctgctcgggtgcaagaatttccacaaccttactgaatttgatggaacgtcgcgacgcccagtttggcctagcgactatgtgcattggtttaggccaaggcattgcgaccgtgattgaacgcgtttgattaaaacaaactgtaggacccgttaattcgggtccgtaccaccgctgtacctggagtttagttgccgtattttcccgcctgtcaggggcgggctttttttgttccggcaaaacggtaaccggaacacagcgataaaaccgtcagataaaggcgaacgcatcgccgtaaatatgcgcttcctgcgcaccgcgctctgcacagaaacgttcgcgagctattttggccatttcaaaacggccagcaatgtaaatatcctgctccgccaatgaaccataatcctgcaacactgcacttaataccgtgcccgttctgccacgccattcgtcttctggctgttccaccacgggaatgaccttcaactgagggtatttgatcgagagcgcttccagctcgcttaaatcataaagatgcttggattcacgtccgccccaataaatcgatacttcccgatttggtttttcagccagcgccgccagcagaatggaacgggcataagagaaaccggtgccgcccgcaatcaggatcattggacgctcgctgccttcgcggaaccaagcttcgccgtgtggaatatccacatccaacgttttctctttcagaatgcgatccatcaccgccatcgcatacagatttaactcagatgcgccaatatgcagctcgatataagcctgctctaatggcgttgacgccatagagaatgggcgcttatcacgctcatccatcaccaccatcaggtattgaccagcgcggaaagaaaacgccgattctggtaccagttgcactcggtataccgtatcggtaatggcctctacggaggttactttacagctcaatgtcgtcatgcgttccctctgtcgggtcatcaaatgcaaaactatggacaaaaatcacgcaatcagcgctcaggctctttgtcactgaatatggcaagctcatcccagatcgcatctacacgcgtgcgaacctgctcatccatcttgataggacggccccattcacgaggggtttctgctggccatttgttagtggcatccagccccattttcgatccaagaccggaaaccggcgaggcgaaatccaaataatctattggggtattttcaattaataccgtatcgcgcgctgggtccattcgggtggtaatcgcccaaatcacgtcattccagtctctggcattaatatcatcatcacaaacaataacaaatttggtgtacataaactgtcgtaaaaatgaccacacgcccatcattacgcgcttagcatgacccgcgtattgttttttgattgtgacaaccgctaagcggtaggaacagccttccggtggcaaatagaaatcaacgatttccggaaactgtttttgtaaaataggcacaaaaacttcattcagcgccacgcccatcaccgctggctcatccggcggacggccggtataagtggagtgataaatcgcgtctctacgctgagtgatatgcgtcacggtaaacaccgggaagctgtctatttcgttgtaataaccggtatggtcgccataaggaccttctggcgcaatatgaccctgctcaatatatccttccaaaacgatttctgcacttgcaggaacttcaagatcgttggaaatacatttaaccacttcggttttatgcccgcgtaataaaccggcaaaagcgtattcggataaggtatcgggaacgggagttacggcagccagaatagttgcgggatcggcacccagcgcaaccgaaaccgggaaacgttcaccggggtgcgcctcgcaccattcctgataatccagcgcaccgccacggtgggataaccaacgcataattagctgatttttacctaacacctgttggcgataaataccgagattttgccgttctttatgtggcccacgagtgatcgttaacccccaggaaaccaaaggcgcggcgtcttcaggccagcaatgcatcaccggaatgcggctgagatccacatcatcaccctgccagatttgctcctgacaaggggctgaactcagacgcttggtcggcatattcagcacttgtttgaatttgggtaacttatcgaataaatcgcggaatcccttcggcggatccggttctttcaggaaggctaacagtttaccaacatcgcgcaatgcgctgacatcttcttgccccatgcccatcgcaacccgtttggctgtaccaaacaaattacaaagcaccggcatctcatagcctttagggttctcgaacaacaacgcggggccgccagcacgtaaagtacgatcggcgatttctgtcatttccagataagggtcaatcggctgggttatgcgtttaagctcccccctctgttccagcaacgagaggaagtcgcgtaagtcacggtatttcatgatgatcattatggcggccacaggatgggccattataggctgtctttatagcagttgctgtctttttgttaaaaatgtatacctgctcgctgtaaatgtagaatcgccatcctccaatagtatttttacactagaaatcatggtttgcgagtgggcaaagccatgattctagtcaggtctttatctgtcactgacggcgacttgtagatatcaggtacgcctcagcgcgaacagccaatgtgggatcatcactgacacgaatcccctgcggcagcactgttggaataaatacttttttatcgcattgctgatcggtaactgtctcgataaataaccgccccatatttacctcacgccgttcagccggccaggactgcgtcgggtcaatcaaattatcacctttctgcgctacgatggcgtacaggtcgtattctataggccccttggctaggcgttgccgcaattcctcttgcaagaaatccggcgactttgccttcgcctgctcatcgcttaacccctgccgtccttccaccggctccatacgccagcgaaccgcatactgggactgatctttataagtgataaaggtactcccgccccaatagggaattgtagcgtagctggcagggacgggctgtgatgcaacatactgagcttggcgcaaagtatgaggatgggattggttaaatgtgttcaatcgctctggattgggctttcctgtttcgggatctggcgtcctgacctttaaaaactcgataaattcctgcggggttcgagcaaaaaagaaaggggatgagatcataactaactgccagcgagagtgcttcgtattaaccagctcaaacgccagtccacgcaagtttttggcgttatcggcggccttaggattcccccctccgattgaaaatcgaccgacaacatcagactgctcgtttttacgcaataaatcagcctgtgaaagttcagtcccttcaccgctggcgataaacttacctgaaaaacaaaagcctttagcatgggacgcccgctgtttactgtgtcggccgaatacatcatttagagcgttaaccatctgctcagcggtgatttcttggggaactgcgccggaaacgcttggcaagcaaccaaaagtaattagacatgagagcaaggaaaaactaacttttcgcatcgattttctccaaccatttctatcttagctgtaatgaatcgcgaccatcattactgcatataatttagaaaattctctcatttcaagcgggctatgttatttaactaatcattaaaaatattagtaaaacttacatccattggtgctttcagatgcgcgatacaaactttcctattatccaaacaggagcaaaccaatccgcagcaagacattgcattcaattggaactgctcctggctgaaaaaaaattattggcaatagaatggaacccaatccgctagcggccgagtatcgtgatattcctgcggctcctcgccgtgatggaatactttaaaacccttatctagcacgctgaaatagcttagctcgttgccgctaacgtgcagcagactgccctcgcgtaaagccacgactctctcgcctggattaaccgcgcaaaactcagctaatcgctcatctcgcgtttctcccatatggccactgatatgcgcatcaatataatgtggattaatttgcagcgggaatagccccagcgacggtaaaacaacgctattacgaaccggcatatcattagtggtgcgaatactcggcgtagccacgttacatcctgcgctccaaccgacataaggcacattgcgctcgcgaaccactctctggataggaacgatcagccctttctcatgcagcatctgatttagcatccaggtattgccgccgctgattaaaatgcattccgcttcgccaatagccgctacagggtcggcggcatggtgaatactggttacagttatgcctaaggttttttccagttcctgagcgcgttgatcaaaatcgctgcggatcaatgcataagggataagaactgctgaggtaattttccggctagtgagcatcacccgaatacgatctttggcataaccaagcagttctgcgtcacccgataccttgccgttactcagcaaaaacaactccatgactctctccttttactattcaacaggacatatctacattaactcgaggcgacaattcagttacaccgaggattaataggttagccttacttatatctgatttcatatttcagggttgtgatacctgctgggaaatctggtgtgcatgaattaattcaccatcactacaaggtattcaatactattttcagcggctatatatctgttatcgcatttgatatgctgatggataggatctcgaggcatatgaaatcatggaatcttggtatttattatattgtaaacgcggacaaatcttgcgagccaaagagcatttagagcgtcagcaagtggtgtgccaaacgcctatcgctgcggtcgagaagattattcggggcaagcgtaaagtggtagacgagcctttgtttcccaattatctgttcgtaaaatttgatcctgagtgcatccataccacgacgatcagctcaacgcggggagtcagtaattttgtgcgttttggcgcagggccggttgttgtctcagattcgattattcaagctctgctcaactattctcaggaagtgattatcgatcctgacacgcctgcttctggggacaaagtccagattactgaagggattttcgaagggttacaggccatttacgcagagccagacggcgaaacgcgctcaatgttgcttctcaaaatcctgaacaaagaagttagtcaaagcctgagcaacaaccagtttgagaaaatctgatatcaatctgaaaacatgacgaggcaagcgtgctatagcgcctgcctcgatattaatgtctagcgctgcatatgctcatcatgcagccactgagcaacctgcttagcgaaataggttaataccccatccgcgcccgcacgtttaaagcatagcaatgattccattaccgctggtttttcctgtagccagccgttttgaatcgccgccatatgcatcgcatactcgccagaaacctgataagcaaaggtcggaacgccgaaagtatctttaacacggcgcaccacgtccagatacggcatacccggtttcaccatcaccatatctgcgccttcctgcaagtcctgcgcaatctcttgcaaagcttcgtcgctattggctgggtccatttgataggtctttttattgccacctttcaaattgccgctcgagccaatcgcatcgcggaatggaccgtagtagcaggaagcatattttgccgaatacgccatgatttgcgtattaatcaacccttgagcttccagacaatcgcgaatcgcgccaatccggccatccatcatatcgctcggcgcaacaatttcagcccccgcttccgcatgagatagcgcctgacgcaccagaatatctttggttatatcattgataacatagccatcttcatcaatgatgccgtcctgaccgtgggtggtataagggtctaatgccacatcggtcaacaaccctagctccggcactgcgtcttttaacgcacgtaccgctcgctgcaccaaaccgtcaggattataagcttcctctgcgtgtaaagatttgaagctcgactcaatgacagggaacagagaaagcacgggaacaccaagtttcgcgacagcttcagcttccttcaccagcagatcgatagtcatccgcgagacgcccggcatagaaggcacggcctcttgtcggttagtaccttccatcacaaacacgggataaatcaggtcattaaccgtcagttgattctcggcaaccaggcggcgactgaaatcgtggcgacgaacgcggcgcatacgacgacctggaaaagtacccggaaatgcatagctcatttttctctcctaactcaaaccaaccggaaaacccggcgagcgttttcagcagttttctgtcctagccattcagggtcttcttctcgccaggcagcaacctgccggacgatgtgaggcagaaaacagggttcattgcgacgagatgcaggtttaggatgaagatcccggggcaataaataaggggcatcagtttccaacaataaacgttcggcaggaatacgtggcaataaggctcgcagctcaagaccacggcgttcatcacatacccaaccggtcatacccactgacaaacccagcgacagacaatcatccaactccgaagccgagccggtaaagcagtgcacgacagccgcggggagcttttccagccagggagacaacagatggacaaagcgatgatgagcatcgcggcaatgtaaaaatactggcagtgacagttcggctgcaagagccagttgcgcagtaaatgccgtctcttgctctacaggtgtagaaaagttgcggttaaaatccaacccgcactcccctacagcgacgacagaaggtgaagccgctagagcatgaatttgctgctcaaccgacgcgttccaactactggcatgatggggatgaacgcctgccgttgaccaacagtaatcagggtactgggccgccaatagtgcagcttcatggctttcttctgcgctggtgccggtaatcaatagaccagcgactcctgcttcttttgctctttcaaccacctgatgtctatctttagcaaactgtgtactggttaagttgacgccaatatcaaacatggttatcccaaaacagaagccgcccaaaggggcggcttgacttgtaaaactgaagcttaaggtgctttaggttggtcttcctcgtcctcatcctcttcttctgtcaccggacgacgctgcttaccgacataaaaacgggcaaaaaagacgccaacctcaaacagaagatacattggaatcgcgagtaacgtttgtgagaagacatcgggcggggtcaacaacatccccacgacaaaagcgcccacgagtacataaggacgttttttcttcaaatcttcggggctggttacgccactccaacacaataagataatcgcgattggcacttcaaaggaaatcccgaaggccataaacaaagccataacaaagctgaggtaattattgatgtctgtcgcaatcatcacgccttccggcgccgttttcgcaaagaaaccaaaagccaacgggaaaacgataaagtaggcaaatgccattcccagatagaacagcaggctgctggaaaccagcaacggtgccatcaagcgtcgctcatgcttatacagcgccggtgcgataaatgcccacacctgataaagaatcattggcgcggcaacaaaaaccgacaccatcatggtgagttttatcggcgtaaagaatggcgatgcgacatcggtcgcaatcatgctggcaccttgcggtagctgctttatcaacggcgctgaaactaactggtagatatcattggaaaaataaaccaatgctaaaaaaaccaccaatacggtgattatgcaattcaataaccgcttacgcagttctatcagatgactgataagaggttgggtatcatcaacagccatgtttaccgatcgccgcctggttggttaagactaggttgtttagaagctggctctgcatgggataccggcgcggagttaaccgaattcgccactaccacatcagtttgatccgccgccgcagcgggcgctttatcttccgaatggctttctacgtggtgcttttcgagattaactggcgcttccggcgctttcaccggcgcagaagcaactgtcgctgactccgcaggagtcacgccatcatgaatagcttccggatcggtcactagcgggttatgaatggtatgctgctccagcgccgaatccggccggtaggaacgcttcagcgattccgccgcatcctttaactcatccatggaagcctttagctcaggagtcagattttgcaggcccgcctgttcggcttttttcaggctatcctgaagttcctgcaatttgagttcctgagacagctcattttggaccgtagcagcaagcgaacgcaatgcgcggatccagccagccacggttcttactgctaccggcagacgttcagggccaagtacaaccaggccaatgaccattaccagcagcagttcactaaacccgatgtcaaacacggtttatacctgctctttgttctgactcttagactcttcagcttttacttctggctgcttatcggtaatagtcttcgttgtaaaatcagcgtcgttactggtcttttcaacgtttgtcggagtctgggtatcgtcaccaatcgcttttttaaagcctttgatggaagcacccaagtcagaacctaaagtccgcagcttgttagtaccaaacagcagaacaacaattacggcaatgattaacagttgccaaatactgataccacccatttcaatcacctctattaacaggggttattccaaagataaccgcattatacggcatagtttgtctctggatactgatctaacttactacgtcttacctaatctttatacggcagacattatttgtaacgacgagcttttcgaaactgaccgctacgaacttgttcgtctccagccgataacccacgccaatgctcccgccaccagtaacccgatagaaatctcggttgcaccagacagctggaaaatcgttccactcactaatagtgtagcgccaacgccgaacaaataccgtgattgcccctgacgttgttgctgcccttgcatctgcgttgtgagcttatctacgctttgctgcaatagtttatgctgctgaaggctgtcgtaaaccagttcaggcaactcagggaatttctctgcccagaaaggtgctttttccttcaatgctcgaataaccgccggaatcccaacctgatctcgcagccagctttcaaggaaaggtttggccgtggtccacagatctaactgcggataaagctgacggcctaacccctcaacatagagcaatgttttttgcagtaaaaccaactgtggctgcacttccatattgaagcggcgagcagtattaaacagattgagtaatacgtgcccaaacgagatttcagccaacggtttttcaaaaatgggttcgcaaacggtgcgaatggcaaattcaaagtcttcgacgttggtatcgcgaggaacccaacctgaatcaacgtgtaattcagcaactctgcgataatccctattgaagaaagcaatgaaattctcggccagatagcgcttgtccgctttattcaatgaaccaacaataccgcagtcaataccgatataacgtgggttctcagggtgttcatagctgacaaaaatattccccggatgcatatccgcatggaaaaaactgtcgcgaaacacttgagtgaagaagacctgcacgccgcgttcagccagtaatttcatattggtgccctgactttcaagagccgcaatatcagaaacgggaataccatagatacgttccatcactagcacgctttcccgacaataatcggagaaaatctctggaacgtacagcatcgggctatcttcgaaattacggcgcagctggatagcattggccgcttcacgtaacagattcagctcatccaacagcgttttttcgtactcgcgcaccacttctctcgggcgcagacggcggccatcaggcaacaatttaggtacccaaccggcaagtcgatacatcaaacggacatcagctttgataatcggccgtatatctgggcggatcaccttcagcaccacttcctgaccattctcttttaaacgagccgtatgtacctgagcaatagaggccgatgccagagcttcctgttcaaaatcatcaaaccaggtttccagcggcccgcccatcgccaactcaatgtgcttacgcgccagcgcgccatcaaatggggccacgcgatcctgtaacaaggccaactgatcggcaataaccggaggaaacagatcgcggcgggtcgacatcatctggccaaacttaatccagacggggcctagttcctgcaacgctaaacgcagacgctcgcccagaggcttatctttgtgacgattaggaatccagaagaacagatagcggccaatgcgtaatggcagcgttaaacgaatcttcgggattaactcatccagtccgtaactcaaaaatacccgaataatcaaatacaggcgccgaagttctcctggcgtcatcgttttgcctccatcttggccaaccgggcatcaaaagcatccacatcacgcttaattgcatcaacttcttcgttaaaccagacaatctccaacggagccggtgccaatttccactcttcagttaatacttcagccagataagcctgctgctgctgaaaacggctgactaaaaacttaccgcctttacgcaatgtctgccctattgtttctgctgcgatatcaccaatatagggcgctagccattcggcaggttcccactcagcgagatctaataaagccaccaattgttgaacgacctgaatgtcaccatcgacgatcagctcaccgctgcgcattaaaggtgacagctgctggcgatcccgaagcttcgataacactgcaattccggtttttaccgtacagtccgcattgccttcccacgcgctcacaacgtcaacctgggcatcgctgaacaccagaaccagaggttggttcagctcatgcagctcaacacgtaatactttggaagacaaacgagagcgagccgctttcataccgcgatcgcggaatagcagactattgagtgcagtttccagagccgccgttatcagcggcgttaataaaatcggcttcagcaacattggttttaacaacattggttttaacaacattggttttaacaacattggtttcaacaacatgggcacatccatatcagaacttaaacccacggtgtaatgcgacaataccgccggtcaagtttgtataggttacattttcaaagccggcatcaaccatcatatcttttagcgtttcctgatccggatgcatccgaatggattcggtaaggtagcgatagctgtcagcatcattaacaaccattccaccaatttttggcagaatgtggaatgaataggcatcgtagactttagtcagcggctccagcagcggtttggagaactccagaaccaacaggcgaccacccggcttaagaacacggaacatggatcgcagcgctttttctttttcggtgacatttctcaaaccgaatgaaatcgtgatgcaatcaaaatagttatcagggaaaggtaaagcttcagcatttgcctgcacgtagctaacgttgccaagaattccgctatcgcgcagtttttctcgccccattcgcagcatggattcattgatatcggccagaacgaccaggccttgctcacctaccagtcgagagaatttggccgtcagatcgcccgtaccaccagcgagatccagtactcgctgaccacggcgaacgccgctacaatcaatggtaaaacgcttccagatacgatgaataccgaatgacatcagatcattcatcaaatcgtatttcgccgctacggaatgaaaaacttctgccaccatgccttctttttcttctttggctatggtgcgaaaaccgaaatgagtggtttccttatcctgatctaccattttctctgcctgcttttcagtcaatctttcggaggagtgtaccagaaccgaggtgaaagccccacttcgcccagcgttagccggttagcctgtccgctgattttcagcgcgaacatagcgagtgagacactgctaattctgatatttcagtgaagtcgaatcatcttgtaacgacgattcagcctcatcgtttgagagggctaaatccccctctggatcgtgctctgcaatggcgcgtgcagccaatgacgggctaataggttttttcacttcaacacctaaggcacgaaaactttcaacttgccctatcaggttaccacggccttgagccagtttgttcattgcctgacgataacttatatgtgccttatcgaggctttggcctatggattccatgtcatccacaaacaaacgcagcttatcgtagagcttgccagctcgttcggcgatatgttgggcattctgactctggtgctcgtaacgccataaattcgtaatagttcgtaacgcgaccagtaacgttgtcgggcttaccagcatgatgttgtgctgtagcgcttcggtgatcaactccggctgcctatctatggcaaccaaaaaagcaggctctaccgggataaacatcagtacgtagtcgagcgtacgtaaacccggcaactgctgataatctttacgacccaactgtttgatatggttacgcaatgatgaaatatgctcgttcaaagcctgagttcgctcggtgtcattatcgctattgaaatagcgctcataagccaccagcgacattttggcatcaatcaccacgtccttaccctgcggtaaacgaacaatcacatccggctgcatccggctattgccttcaagattgacgctaacctgagtttggtattcgtaaccgtcccgaagtcccgaggcttccaacactctgccaagcacaacctcaccccagttcccctgagttttattatcacctttgagcgctttggtcagattgagggcttcccgtgccatctgggcattaagttgctgtaggctccggatttcgtgagtcagcgtatgacgctcacgggcttcctgaccgaaactatcctgaacctgacgacggaaaccgtccaattgctcgcgcaaaggcaggagcaacttatccagactctgcttattctgttcatcagccctacggccagtttgttcaaagatgcgatttgccagattctcgaactgagtggtcaggcgttgttcactattcatcaataatcgctgcttttcttcagcagccaggcgcgtttcctccagacgaatggtgacttcacgcagttcggcctcctgcgcactgttcacttctctctgggcgcgcagttcctgattaagttgctcacattcattacgccaatgattaagctgctgtagcttctcactgccagcagccagctggctatgcaggctgcgtaattccaacgcattctcctgcaattgttgctctttacgccgttgggtctcctcctgctggactaagtcctgttgcgactgttgcaatgattgttccaacagccgtagttcagtttctcgctgtgtattacgctgctggaaacgcaaactggcaattaaccagcccagcaggccccccataacacagccactcaagccccaaaatatactggtatccacgctgcctccgcctcattaaccctctgcccgtcaaggtaaggggatactgtatggatgtccagagggttttcgccttacatccaaggatgcgaaacagtacgcaaaactataactccatgcaaaattcggtattctcgccaccggtaaatcggctaaaacaaagtggaaccgaatacaacctgtagggaggtcaacccatccaatgagtaagccatttaattccgaaagcaccgggcgcgaggatgccaaaggcccaaatcaacgccgaagtaatattggcaaactggaaataacgttgaggcatggcgcatatgccagcaaccaaaggaacgatggcgcgcagcgggccgaagaagcgcccgataaaggcaccaaatacgccccagcgctcaaaaaacgcgtgaccacgtaccagtaattgaggatttcgcgaaagtggccacatggttgccacgcgatcctgataatggaaaccaatccaataggagagccagtcaccgaagaaagcaccggccgcagccgcagcccagatcggccagaagggaattccgctttcaccgatgagcgcccctagccccaataagataacggtcgcaggcaataacaatgacaaaaaagccagcgactcaccaaaggcaaggaaaaagacgataggtgcagcccagatttcatgttcacggacaaaatccgttatgtaggttatgacgtcattgagggtcacatgcatcttcctgttattgatgagattacgagccaacagcataaccaattcacggcagctctaactcaacaaaaaataaacggccggtaaatgccagccgtttaaacaggttaacgtacagaattaaatatgtcaggcatttgccgtgacggagcgcttagacatctcggcggaacgacgagtccaaagctcacgccattttctcaaagcggcgatgaggatgattacgcctagcgtcatcataatgatggatatgatgccgttaaacaggttgtagcccgaagccgcagagttaaagtacacatgtctgatcatccaataaccggcataatttacggtaacaaacaggtaagccagcgggataatacaggtcagcatatagatacgtttggtagccaaacgcaggataatggttgcaccaataatcaagccaacggatgccattaactggtttgatacgccgaacagcgcccaaacggagttgatatcaccagagttcagtaaatagccccacagcgcacaggcgataacgctacaagccagagtacccggtagccaatccgtacgtttcagtggtgcccagatatcgccgaggaaatcttgcagcagatagcgtgcaacgcgggtaccggagtctacggcggtcaggataaatacggcttcaaacatgacaacaaactggaagaagtaggccgccagactgctgaaccatggcacgcggataaagatatctgtcatacctacggcaagagtaactgcgccaccggtacgaccgtagagatccagaccgatctcctggcttagcgttggtaggttaaccacatccatgcccaacgcgccccaagcttccgcagaggagttaattgcaaaataatcagcgggatgcaatgaagttgcagcgatcagcgccatgacgccaaccatacactcggccagcatagcgccaaaacctaccggtaaaatatcgctccacttatcaatctgtttcggcgtggtgccagaaccgataaatgcgtggaaaccagagattgcgccacaggcaatggtaatagaaataaacggccagaccgggccagccagaaccgggccaccgccgtggataaactgagtaacggcagggaactgaatttccgggttaatgaaaacaacgccgattatcaacgcgccaaatacaccaatcttcataaagctagacagataaccgcgcggagttaacagcatccacaccggcaaagcggtcgcgaagaaggcatacaaaggcagaatgatactgacggtattggctttcaacgtcagccattcacccagccaggttccttcgatataagggcccacgaaaacacagaccataatcgcggcaatacccacgtaggaagcgcctctcatgctgccggtcattcgctcccacaaacctacgcaaatggcgataggaatggtcatgaataccgcgaaagccccccaagggttgcgctccaacgcatgcaccacaaccatagataaaccggccatagtgattgtgatgatgaacaacatagccaaaccggtacaccagccggcaatcggccccagttcggattttgcgacttcagaaagagatttaccctgatgtttcatcgaggcaaacagcacgacggtatcgtggacagcgccaccgatgacacagccgattaacagccacaggaaacccggtaagtaaccgtattgcgccgccagcacggggccaaccaagggccccgctgctgcgatagccgcaaagtggctgccaaagttgacccattttttagtaggaacgtaatctttaccatcttcgaaggtgtgggaaggtgtaatttcagtatcatcgacctgcagtactttccgaacaaaaaagataccgtataagcggtagcagatcgtcagaatacatactgtggcgataacaaaggtaatcgcatgttgcatgattattctctccagggaatttatcaggcgttaacatacgcctggcctataagagaagcgctgaggatctgattaagcggtcgccagcatgattaagcggtcacaaaacgccgctaagtggcgatcggaaaattgaagatatacgaaagaagcaaaaagctgacgacggtaccgccgccaacaatatgatattaatcacaaaaaatgagttttatatttaagagttactcaagataatacgactgaagttgctctctttcagcacgacccagaccgaactcctgcagtaaccagttatcacgattaccatagcggtcattaatgctggttaatgcggtatgaaggaattcttctctggctgaaagcacgtaagcgaactgattcaacgcattatcgtgaagctttttagccagttcgctcaacattaattcgcggaacggcgcgagcgtcgtttcagttagcaagtaatcctccagaaccgttgcttcatcggctcccagcgcaaacaataccaacccggaaccaacgccagtgcggtcttttcctacggcacagtgctgcactacgccagtaccttcagaattacgcaataaatgaactaactgtcggtaagccgagttgttaaaaggcaagcggcgataaagctccagcataaatgaacgagcatcaaactcggctagcgtttcgttactgagcttatccagattggcgttgacgtcggtactgagagggttcgcggggaaatgatggtatgtggctccttgccaaaggatatcgggtttagcctgaacttcatcggcatcacggtaatccagtatatggccaacggcacgcttatgcagaaaagtacggtctttttcactcaaccgatctaatgaaccggagcgaaacagtaatcctcgcttaactctgcggccatcggctgccaggtaaccgccaaaatcacggaagttaataccgccatcaagcggaaccagtgagggatgctgtgtaaaaggggtagtcataatatcctcttattatatcgtccattataagaggtaaaaccttaccagattatcagtggaaggaaagaacgggccaccagaggcagcccgacacgcgattacaacaagcgacgagctgcttcaaccacgatttttaccgcatgactttcggttttttgcatagtctctgcgttaggaatttcttgctgggtacggtttacgataacaccggcaaccataccggcgcgcaggccttggctggcgcacatagtcaacagcgtagcggattccatctcatagttcatcacgcccatagcctgccattcttccatcgagccacggaaacggctcactacgcgaccagagaaagtatcgtaacgttcctgacccggatagaaagtatcggacgaggcggtgacaccaatatgcgtggtcgcgccaatggatttagccgcttcaaccaaggcggtagtacaagcgaaatcagcaaccgcagggaactccatcggtgcgaaatgcagactggcaccgtccaaacgcactgcgcctgtggttaccagaacgtcaccgacgttgatgttaggctgaatagcaccggtagtgccgatgcgcaggaaggtacgtacgcccaactgagccaattcttccacggcgatagaggttgacgggccgccgataccggttgaacaaacgataactgccttaccgtccaattctgcacgccatgaggtaaattcacgatgagaagccagatgtactgggttatccattaattttgcaattttctcaacacgttgtggatcacccggaacgatggccaaagtagcccctttcagatcgtccttcgtgaggccaaggtggaaaacatcggatttagacatgtgagactcctctttcatgagaaatattgtagggaggaacaaagaactactttactcaatatcaccgaattatttcgtgatagcagtcactttgatagaagaaatagaatgtataagaacaaataaagtgtgacaaaaatcacaaaataacaccgttcaggttattttttgtgctttaaaagccctaaataagagtaacagcatccagattcactcaacggccgaaaacagagtgtgtgtcagctcaccttttcaccgttcgagcacacatttaatccgttacgacatcgcctttccgccattaattgcaaatattacctatagttaaatccggaaaactcattcgctaacttcagggagaccattatgaagactgacccactcattactctcaggcaaacagccggaaagttcacgccggccgttaatccgttggcctcctccgttattcataccgataaaaaaggcattcaggccggtgatactacaatcccgtcgcagggtgatttgctgccagcttatctcgctaaaccggcacaacataatggcccttgcccggtggtgattgtagtgcatgaaatcttcggcgtgcatgaacacattcgggatatttgccgccgcttagcgaaacagggctatttggccatcgctcccgagctgtatttccgccaaggtgatgccagcgaatacaatgatatgaggccgttagtcagccagttggtcaataagatccccgaccgacaagtattagtggatttggatcatacggttaactgggcctcccgccacggtggggatatcagtaagttagcgataaccggtttttgctggggagggcgtatcgcctggctttatgcggcgcataatcctcagttgaaaacggcagtagcctggtatgggaaacttattggggataaaagccttaatagcccgaaacatcccgttgatattgcgatcaacctttccgctccagtactgggcctgtacggcgggcaggattcaggaatttcacaagatcagatagaaaccatgcgtcatgcactacgtgccgccaatgccgacgctgaaattattgtttacccggaagcgggccacgcctttaacgccgattatcggcctaactacaatgcggaagccgctcaggatgcctggcagcgaatgttggactggtttgctcgccacggcgtcaatgcccataaaccggtcgatgatgcctcttaaacgtttcaatccatatctttcaccaacattcccacttcggcataaacctcccccagcagcaagatagggggaggtttttatctatcagtcgcacaaaattctgcacgcatcaatttgatacttctattctccaatagcggtttcaccgtcagtacctatcagctataaaaaagggcgctaacaaagttgagaagcggagacatgtgccgaatgggtcggaacagcgtgagccgtcggcccccctctcggtgcagtcgccccaccagcttcggggtaactgcataggcttgccatcaacagcaaggccgccactgcgcctttgattcagtgataaataatcaggcttgctcttcacgcagccgctgggccgccaagaccatgttggccagtgactgacgggtttctggccaaccacgagttttcaggccacaatccgggttaacccacaggcgttcagccgggattcgctgggccgctttacgtagcaaggcttcaatccattccacgctaggcacgttcggcgagtgaatatcataaacgccgggtccaatctcatttggatagtcaaagtcttcaaatgactcaagcagttccatatctgagcgggaggtttcgatggtaatcacatccgcatccaacgcagcgatagaatccatgatgtcgttgaactcgcagtaacacatatgggtatggatttgagtatcatcctgcgccacggcggcattcagcttgaatgcatccactgcccagtccagataggcctgccattcagcccgacgcaggggtaaaccttcacgcagcgcgggttcatcaatctggataataccgataccggctttttccaaatcttccacttcatcacgcagcgccaacgcaatttgcttggcgatggtttcacggctcacatcctcccgcgggaatgaccagcataggatagtgaccggcccggttaacatgcctttcaccggcttgtcagtcagggattgcgcatattgggcccattcaacggtaatcgcttctgggcggctgatatcaccgataatgaccggcggttttacacagcgggaaccgtagctctgtacccaaccgttttgcgtaaagacgaagccatccaaatgttcaccaaagtattcaaccatgtcgttgcgttcagcttcaccgtgaaccaacacatccagccccagccgctcctgctcggcaatcgcctgtttgatatgctcgctgataccggtgcgataatttttgccatccaggcgaccttgtttgaagtccagacgcaagccacgaatttcagtggtttgcgggaaagaccctatggtggtggtcggccaggccggtaaattaaagcgtttacgctgcgcttcggcacgctgtgggtacgggttttggcgctcgctgtctttcggcgttatagccgccagacgttgttccacgtgtggattatgaacccgacgagaggactgacgagcgcgaattggagcgctgtaattcgctaattttactagtttttcttcgtctggcgcattcagcgctttggttaacagagacaattctgcacatttttgcagcgcaaaagcaaaccagtttttcacttctgcatccaaacgggtttcttcactgagatcgattgggctatgtaataacgaacaagaagtccccagccatagttgacgactgccgaccaacggctgcaaacgttcgaaccatgtgctcagatcggcacgccacacattacgaccattaatcacaccgagcgacagcagccaatctttgggtagtttctcattcagcgtagcgatatcgtctttaccagccactacgtctacatgcagcccctgaaccggcagagcgcgaatagtatccagattgtggccgatgctatcgaaataggtggttagtaatagtttaacctgcccttgtagcgactggtaagccggttggtaagcatcccgccattctttaggcagctccagtaccagcgccggctcgtcgatttgtacccactcgatgccacgtttagccagctcggccaaaacttgctgatacaccggtaagatatctttcagtaaggttaaacggtcaaattgctcacctttgactttacccagccacagataggttatcgggccaagcagtaccggcttgattttgtgtccgagcgccagcgcttcgtcgacttcatccagcaattgcgtccaaccaagcttgaattcctgcccttgctggaactcgggcaccatgtagtggtagttggtattgaaccatttggtcatttctgccgccgctgccggtttaccggttggcgcacgaccacgaccaatgcggaataatgtatccagatcgatactcccatcagcattctggtggcgtgccggaacgttacccagcaacaaactcgtggttaacacatggtcgtaccaggcgaaatcgcccaccggaaccagatccacgccggcttgctgctgttgctgccaatgacgagcccgcaattcgcgccccacattgagcaattcttcctgcgtgatgttgcctgcccagtaactttcttgtgctttttttagttcacgtttcagaccaacgcgtggaaaacccagtgtgtgatttaaaattgccatcgtcatactctccatttagccatccagatgtttacacatccataatcagcaggtactgtattaaccacaagcgcaattttttcactgtcactgtgaaggactctcatgatcgaactgaaacacttacgcacactgcaagccctgcgtaataccggatcgctggctgcggcagctacacaacttcatcaaacccaatctgccctgtcacatcagttcagtgatttggagcagcgtctggggttccgtttgtttgtacgtaaaagccagcctctgcgtttcactactcagggagaaattctcttgcagttggccgagcaagtcttgccgcaaatcaaacaggcactgcaaacctgcaaagaaccccatcaaacggccctgcggatcgctattgaatgccatagttgtattcagtggctaactccagctttggacaattttcaccagaactggccgcaggtcgcgatggatttcaaatcaggggtcacttttgatccgcagcccgcgctacaacaaggtgaacttgatctggtactgacgtctgacattctgccccgcagcggtttgcattactcgccaatgtttgattttgaagtccgtctggtgctgtcgccggatcatccgctggcagcgaaagcacgcattgaaccagaagatttaaccgatgaaactctgatgatttatccggttcagcgccaacgcctggatatttggcgtcatttcctacagccagcaggcgttagccccgcgctaaaaaatgtcgataacaccttgttattgatccaaatggtgtccgcacgtatgggtattgccgctttgccgcattgggtggtggagagttttgaacgtcagggtttagtcgtaacgaaaacactgggggaaggtctatggagccgactgtacgccgctgtccgtgacggagagcagcgccagccggtaacggaagcatttattcgttcggcgcgtcagcacgcttgcgctcatctaccttttgtaaagaatgcggagcgacccaacgccggtgtacccacagagaggccattatcaccgtcccaccaataataaagctcggccaatgcggtttttcctgccagatagccaggttgaccaataggccagcaggaacatggacattattcataatgccgagggtgcccgcatcaacctgcgtggcaccgtagttccacataaaataacccagtgcggaagctccaacgcccagccaaatcaaaacgccccactgcaactcggtggttgggagtttatttgcgttaccaaaggcgaaccaagcgacgactgcgaccaacaaggctcccagataaaaccaggaaaaagcggtgtgctgcggaatcggatgcacttccatcaggcgtttgtagccaacctgtccaatagcaaaacaaacattcgccgcctgaactaaagccaatcccagccagaaatgctcgctcagatggtcataacgaatgatagccgcgcccactaccgctaataaagcactgagtgcataaccccagcgtagccgctgaccgcggagaagatcataaatcagagtgacatacagcggcgtcatcacggtaaacagcaggaactccggcacgctgagatacaaataagcacggaagctgaacaggtacataatacctaactgaatagcgccaacggccatatacagcgcaatcactctgccctgaatattcttccagcgaataaacggcaggaaaaccacggcggctaaaccaacgcgcatcagcacggagaaccagctatcgacctgacccgccagatattcgccgattaagctgaaagaaaatgcccacaagatagtggtaataaccaataacaacacgataggttaagctcatcgaagaaataaaaaccaattgtatcggaagcgagagctgaattttgcaccaacatggttgacgtatgcataattattgttcgattgattgtctttcgcagattctggcaaccagaaataaggaatttaagatgagacaaatacattttctgctgggcgctctacttctgcccaccgtagtattggcacaaaacagcctgacgccaacgcctttggagcagcaacagcgcgtattaaatcaacaaagtgaactgcaccaacagcagcgaactttgataaatcaacagcaagaacagcgccgcttgcagcagcaatatcaatattcgcaggatcagcgccgtttgttacagccaacaccggtggctccgattgctccccccgccgatcctttcaagcgaacgacgccaacggtaccgagtattcagccggtaaaacctgcccaataacgctcagattctcacgcccattagtgttaaaatcagcggcgtagttattgcagccaacgcggtagacatcactaaactggcagcggccgggccggtcaatgcgttaaattgtcgcgacatcagatacacgttgactccggtcgccatcgagccaagcaataccaccacctgagtttccagcggtggtaagcccatggcccatgctagaacccacaccgccaatggctgaacgatcagcttcagaaaacacatcgcactgctgatacgccagccatcgctgacacggtattccgccaatcccatacccagtaccaccaatgacagcggcggcgcaacctgccccaacatactgaccggctgatcgatcatcggcggcaatttccatcctgtcagactgaataaagtgccggagataatgccaataatcagcgggttggttaaaacactgcgcgcggtcttggcaaagccttgcaccgtcagcgaaccgttacgcgcccattccaccgacaccgtgactaacgtccataaaatcagaccgttaaacactaaaaccaacgccaccgctggaatagattcttcccccagcatcaaagtggctatgggtaaacccagcatcacgttattggaaaatatgccgcccaaagcgaataccgagccggaaacaccgtccaacttgaatacccgccggccaatgattcgcccaagaataaacaccaacagacaactgccgaaaaaggcgattagcaggcgcgcgtctaccgcaggccgatcggcaaaattactcatcatccggaatagcatggccggtaaagcgagggaaaaaacgaagcgcgtcaggccatcggtaatgtttgacgtccattttccgattctgaccaacccatatcccagaaccaacaatacaaataacggcatagacaacaagatctgatgccagagggaaaagataaaggcgggcatgaataatattcctgtcgcgggttagggtcagcccgcctgataacggaggctgacctaataccaacaggagtctgacgggtcagcgttcggcaaaatccactgcgatcaaatctatacggtcggtgcagatacagtcaacgccccaatctaacaatacccgcgcccgctccggcttattcaccgtatacaccaaaatatgcaatccggcggctttcaatagcgccacgcgctccgccgtcagctgtttatgattaatatgcaaagatacgcagttcagacgccgcgtcagctcaaaccagttttcatcccattcgtccagtaacagcccgcgtggcagttctggggccgcttcctgcgccgcttcctgcgcggtaacagaaaaagaggaaagcaacggaggaatagcctgaccttcccacaacaaccgagccgccagcgcaacgacgcggccagtgtaagcttctacgccggtggtgggttttatttcgatattcgccgccataccgtgctcagcgcagcgcgccgccacttcagacagcaaaggcagccgctcatccttaaacgctgagctaaaccaattaccggcatcgagttgaaccaatttatcccagggcaaatcccccgcaacgccccagccgttgctggtgcgctccagcgtatcgtcatggagtaaaaatatctggccgtcctgagaaagtttggcgtcaaactcaatcattttgtggccatggcgcgcgccgacgtcaatggccgccagcgtattctctggagccagtgaaccaccgccgcgatgagcaacaatgggaggataaggccagtttatattcatcattccatccgtaatccgctttcggtatcaaaaaaatgcagcgcttgcgcgggcagcgtgacatataaggtactgcccacatctggcatattctcatgggaaagacgagcaatcacaccctgtccatcccagcgtccatgagccagattatccgcccctagcaattccagcgttagcaagtttagcgctactccgccctgctctaacgtactgagttgaatatgctctggtcggatacccaaggtcaaccgccgatccgcccattccggtttagcatgctcaagcgggatacaagttccgtcgttcagtaaaaactgctcgccgttggcgctaacgctgcccgctaacaaattcatcgccggagaaccaataaaactggcgacaaacaggctggccggccgcttatacacttcgctcggcgtaccgatttgttccgctacgcctttattcatcacaatgacccgctcggccaacgtcatagcctctacctgatcgtgagtgacatataaactggtggtttttaatcgacgatgcaattgctgtagctccagacgcatttgtacccgcagcttggcatccagattcgacaatggctcatcgaaaagaaaaaccgcaggttcccgcacgatagctcgccccatcgccacgcgctggcgctgtccgccggataattcgcggggtttgcgttgcaacagcggttccaactccaggattcgcgccgcttcgtctacccgctggcgtatttgctctttgccaaatccgcggattttcaggccgtaagccatattgtcgtagacgctcatatggggataaagagcatagttttggaataccatagcgataccgcgatctttgggttccagattagtcacccgacgattatcaatataaatatcgccgctggtggtcgcctccagcccggcaaccattcgtagcaaagtggattttccgcagccggaagggccaaccatcacgataaattcgccgtcggcgacgtctagatcgatggttttgatcaccggcgtcacaccgtcataggatttacttactgcctgaagctttaaacatgccatatcagatcacttctcactgtctaccagaccgcgcacaaaccagcgctgcatcagaagaaccaccgcaaccggtggaattaacgtcagaatcatggccgccatcacctgattccattgggtcggcgcgcccgaactggagatcatgctgcggataccggctacggcagtgcccatcgaggcatcgctggtaatcaatatcggccacagatactgattccagccgtagataaaggtaataacgaacagcgccgccagattggtttttgacagcggcaatacgatgtcccagaaaaatcgcatcgcaccggcgccatcaatgcgcgccgcttccagcagttcatccggcaaagtcataaagaattggcgaaacaggaaggtggccgtcgcggaagccattagcggcagcgttaatccggtgtaactgtccaacatattcaggttggcgatcacctgaatagtcggaaagattcgcacttccaccggcagcattagggtgagaaaaatcagccagaaaaacagattgcgcagcgggaaacggaaataaacgatggcgtaggcggagagaatcgacaccgtaattttcccaacggtaatggcaaatgccatcacaaaactgttaaacagcatcagcccaaagggagtgccgttgctgcccacgcccccgtgccagatattgctgatgttttgccacaaatgagagccaggaaccagcgttatcggcacctgaaacacctgttggtcatccagagaagcggcaacaaaagcgacatacagcgggaataaaatcagcagcacgccaataatcagcatcacatggcagaaaatatccagccctcggcggttctcaatcattggtaacgcaccttacgttcaacaaagcggaactgaatcaccgttaaacctatcaccaatagcattaacactacggattgagcggcggagctggagagatccaacccggcgaaaccttcgcgatagattttataaatcaatgtagtcgtggactgcactgggccaccgccggtagcggcatcaataacggggaatgtatcgaaaaaggcatataccagattgaccaccagcaggaaaaaactcacaggggaaatcaacggcagcacaatattaaagaagcgcctaaccggccctgcgccatcaatcgccgcggcctcaaccagtgaacgaggaatggactgtaatgccgcaaggaaaaacaaaaagttatagctgatttgcttccaaactgaggccagtaccactaaaaacatcgcctgaccgctattttgggcatgattccagctgtagcccaacagcccaagaaagtgagtaatcaacccaagtccggggctaaacaggaaaatccacagcaccgcagcgaccgcaggagcaaccgcgtaaggcaaaataagcagcgtttgataaatacggctgccgcgcaggacgtaatccaccaaagcggcaaaaaacagcgaaacggccagaccgattccagccactaatccactgaaaatcagagtggtatagaaagaggccagatagtattcgtcctgaaatagctggctaaaattgcttagcccgacaaactcactggaaagtccgaaaggatcgagagactgaaccgaataccacagcgcttctaccgcgggccacaggaagaaaatggcggtaatcaataactgcggcagtaccaacaaataaggtagccaactacaggaaaaaccggggcgggacgtactcataaccgattaactctttgcaatgttgaactcttcacaccacgctcgcggataaccctatgcagctatccgcgaggcggtgttctccggtttatcaccgaagaattaaattacttattggcttgttcgaagcggcgtagcagcacgtcaccgcgttttaccgcgttgtctaacgcttcctgcggcgtcttcttacctgtccatacgctttccagttcctcatcaaccagggtacggatttgcggcatgttgcccagacgcagacctttggtataaggcaacggcggcttgttcaacatttggcgtgtggcaacgtctgcccccgaattcttatcgtagaagccctgttgtctggtcagttcgtaggcggcggtggtaatcggcagatagccggttttctgatgccattctgcggcaatttccggctgtaccaggaattgcaggaattcggctacgcctttgtaagtttctggatttttgccattcatgacccacaaactggctccgccgataatggcgttctgcggcgcatttttagcatcggcgtcgtaaggcatcatgcccacaccgtaattgaattttgcgtagtgacgaatatccgccagcgaaccggaggaggcagtagtcatagcgcagtcgccgttatagaacttggcggtagattcatctttacggccaaaataggtgaaatcacctttcttattcatatcagacagcagctggatatgtttgacctgtagggatttgttgaactcaagaaccgcatccatgccgtcaaaaccgttatttttgctggcgatcggctgaccgtgccaagcgctgaagttttcaatctggatccagccttgccagccgctggcgtaaccgcaggtcataccggctgcgcgtaatttctcagtatctgccgccagttcctgccaggtttttggcggctgatccgggttcagaccggcttttttaaacgcatctttgttgtaatacagcaccggcgttgagctgttaaacggctgggataataagtggccggttttagcgtcagtgtaataacccgcgaccgtaggaacgaacaccgactcatcaaaattcacaccggactctttaaatacttcaaagaccggttttatcgctttactggccatcatggtagcggtgccgacttcataaacctgcaaaattgctggcgccttacccgaacggtatgcggcaatccccgcggcaagattctgctcgtaattacctttatacacagggacaattttatagtcgggatgagcctgattaaaacgctgggctagagaatcaacctctttacctagctccccttccatagagtgccaaaaaggtatttctgtcgctgcgagcgcattggcactcaatgccaaagtgagcgcagcgccaatagcggttttacggagagtctgatagaacatgtctagcccctgaatcaataagtatggcccgcgcgtataatgaataaagggtcacgcgtgagcgaaataaatcagtttttgttcgaaagcaaacatgacatcgattagtgacagaaaaataatatttttatgacaatgaagcgacaaagaaatgacaaaataaaaacaattatcgacaaataaacaaattagccaacagtaatatatttaaatgaaagtaacggcacgtcattaattgaaaataattaaataataaaaatctatgtataataaattcgaaatcaaatcaaaaaatgaaaataaaaaataagataaagaaacaatatgtcgccttgaggaaaagatattaattatgctagtgtttgtcccgcacagagttaacggctttcatttaaatcatcaataaaacaccgttataaactctgcataaggaaattcaatgttatattataatacaaggaattaataatgaaaaaattaaccctatccgccttaatgtttgctgctttaaccagtttcactgcctatgccgattacactcaacagaatatagatatagatgcagaaatcaccgatttcgtgtctttagttgattcacgcaatgcaaagctgagtagcataacgttaactcgcaatctaaacgactataacaaccccgtttattcatcaactcaaactgttcagcttagaagtgcaaacccagccgataccggggttagcatttatctggaaagcgagccaacgttaatagctaacgagggtgcccaaaatgaaaaaagatttacagatctcagggtaaacctcgatggtcttgaattagaagtaggtgtggggcaggcaactatatttaataaggatgtcgatcttgacctgatcgttaacgcaacggttcctcagaatgctgcaacaggtgaaagatataccggcgttatcccgctaatgctggaatctgctgcttaaccgacggttaattagtctctagtgttaatattaaatagcggagatttcttctccgctatttaaaaatgaaatggaaattatcaccatgaataatggaatggaatccaatggtattaatcgccagtcggatattcagtgggattattttatttaatcttatgacgatgcctttttatgcttgtagcaaagtgctgatcgaacatttaccgccgccgggatttacagctatagatgaagattcatcgaaaagtttattgggcttggtgaatgggaaacatctacctgcgccgcttcattactcatctcaatcaaaagagatttctttcgataaagaaattttcttaaataacggtatcagccatgaaaccatttcagtattagataaattgctcccacagattgcctataatgaatgtaaatcagggtgcgattatttattatccggttatcgggttacattggataaagtaaacaatctattaataattagagataaatcccttgattatttgatgccctcaaccacttggggaatggttcataaccaatcactgaatttacgtgtggcagacaatcattatcgcgccatatcggccaatggtcagggttatatcggccttccctttcaatcctttggatacctgagctggttttataataaaaccgccaatgtacaacaaatgtggcatcagggtgaaacacacaaagggatcgggcaaagctggtatttgcaaaagaatttctcttcgctgtatttacgcgctggccgaaagaatcatctggataacggtgcggccagagtccaaaccctgatctcgcctggactcgatcggtttgtcactttcggaagccaaagttatatggcggagaaaaccacttccgcaggaacattgattttgtacgccgctcagccgggagatttcgatatttaccgtgacgatcagtttatccgccgcttccccgctcagttagggcgtaatgaaatcagctacaaccaattaccgtcaggctattacaacgccgatattcgtttaatcgatcgttctggccgcgaaattagccgggaaactatgccgatcgccaatatcagttttggtggtaatagcggttggtttgccactttcggtcaatctcaacccacaaaatttaaagaaaaaaatcccccaacggcttatctgttacagctggggcgcagctttctcactccgtggtttaattctaatctcagcttgttgatggataacgataaacactgggctgtagacggcaatatctcgcggccaatgtttctgtggagtatggatatcgctccgacgctaggcctgatgagcggcgagcagggttttggtggctacctacggctgagcggtggtaataaaacgctgggacgctggtcaatttcccgctatcaaacaccggatgtttcccgctatacctcaatgggaagcagcagcgcattttcttatggtcgccattttggcccaacggctctgagctacaattttaatcaatcggcgaatcgctctcagcatcgcctgcaaagtgattggcactggcaacgacctcagtatcgtattaatttttcgataggcgccaagaaagagtggcgaaataaccgcgccaatgactacggcctgtttttcaacgccagattaatgctccagcaacataatattcgcctgaccagtatttatgccaataagcagttaaccaacggtattgattatgatcattaccgccaaaatgatgacggcggctccggtttaagcctcaatagtaccctgagtggcaaaaaccatagtatgagcagcacagtatcccggcagggctcccgaggtaatttgtccatcgatgtgggagcgaacaatcaaaccatgttcggcggccttcgttacagcggtatgttcgcggccaatactcaggggattgctttggggccagccggctccggtggcggagccatgctggtcaccacgccggaaattggcgcgccttatagctttagagttcaaggtcaaccggtcaccggcggcagtacgaccgctatacccgtgccgctttataaccaccagagctttgccgacattcaaaccagccgcagtgatatggatatgcatattaatctgccggtcaacataatgcatgctcatccggggcaggttttctcggccaaagccgatattcaactcactctgctatacaacggtttctttagaacccaggaaaaccagccggtctccggcaccattgtcgaaaccggcgatgaggttcatcccaacggcctgttctctatttcttctggaaaagtattgaaatacatcaaggtgaaaaatgaaaccggcagttttctgtgtgatttaagccaacaacgtaaccattactatctttgccacccaaactagccattggtttcataattatggccggcttcatgaataaggaaataacgatgcctcgatatttatcactctccctactcttgcttttatctgctagcaataatctggcctttgctaatctcatcgcagacccaacgcgcgtgactgttgaaggaatacagaaatcacagaagatccgggtctttaacagtggtgataatccactgttcttggaggtttctttggtcaaagtggagaaccccggcgaggctaaagaaataaaaacgccgattggggaaattaaacatccagagatgatttttaatccaacccgcgtcaccctggctcccaatcaggaacgcgaggtttccattatcccgctcaagagccctcagcaggaaacgctttatcggctgtatctcaaaccggtacacaacctgaaagctgccagccattcgacagagccagcaaaagatatcagtgctccaatggttatcagcgtgggttatggcgtattgatacaccacgtaccggaaaaagcggcacagttgaagggggaggagccttacatatgcgttaagggtaacgtccaactcatagcaaaaggcaatattcaccgcaaattcaccgacctaaacgatgcgtcggcaccaaatgacaggggggctaaaaaagaaatcataagcagtaagaatatctatcctggtgttccttatcttactccagtgagaaaactatcaggaaaggtggatggcgagacaattaactatgactgcgaatgacagcattctgaccttactattatcgtcaatattaatagccttaccgttcgaaacgatcagcgccattgatttacgcccgcacattgtaaaagtagaggctgaggagactcacattgaggtaatcaataccggggaaagcacccaatacgtagccattgaattatatcgcctgaataaccccggtgttccgccagagcaagagtctttaactccgctaggcatgatcgcccaaccattattattcgccgcgccaatgaaattaacgctgggagccaatcagagcggaaaaattacgctaaaagcgctcggaaaaccgactaaagagcaggtttatcgattgagcgtcatacctaagcagaatctgaaaacgcagggtgaatctggctcagtgattggcgtgcaaatcgcgtatatggggctgattcgacacctgccccaaaagccagaatcgcgctggcatcaccgctgcgacgcagaaggcgtgacattgtataaccggggaaatatccgccagcgctggcaaaatttatcgcccaataccgattttaatctctatcccaaccaacagcggcagctcaagggacgtgaagtaacggcaacagtcgatgggcaatccgttacgcttccctgcaaacgtagcggagaataggaggttttatgaagattcaccctgttcaattcgcattattattttttacaatgtcatttccggcgatagctgccaattctattcccattggggatattgatgtcagcgtggaaataaccgaacaaccaaaaatcattattgagaaatgcaacggggagcggctcaacaatataagtttaaagcgctctctgaagccggaaaaaagaatctatcacgcgcaaacctgtgttgctgtaaaagtccggcgtgtgaaaggagggggaggattcagagtctggcaacagcagccacttattttacagaaatcccaaaataaggacggtgcaaataaagcattctcaccggcagaagttcgctggggcgattactcagcatccttacaaatcattcccgatgaaaaatcccccccacttatcttttacccgaccaataggttcgggggatggaataccgatacttataccttagatatttcggccaaaccgcccgtcggaagtcataccgcaggattatatcaaggggttttaagtttgatttttgagacggaatcataatattcctactaaatatgcatacatcagacagggaagaatgatgaaaaaaactgcgaattatcgaaaattttgctgctgcgtaggcgcgctggcttttacttcgacagcggctgtggctcaaattgccacaacagtaacgccgctttcccatagttataccaattgtcggatggcgctcagtctaaataacagatttattaagatcagttttcacgcctttgttcatgacgttaaattaaaagaaattctacgcgacaggtttaatctaaacgaggacatacccatcccagaccaaccggaagctacggtactaaatttattttttttcgacgaggaaggtcataaagacttagtgcaatacaacatttcagaaagtagcttaaacggcgaacaacccaccagatttgaagaccacaacaaacttgtctttacgcacgatgtgccgttccagcaacaaatgaagattacgctcgaaacccccaccaaagatctaaagtatttggccgttaatgcaactttgggttaccagtattccgtcggtgataaaatctatcggttaattgatgagaatgccgttacctttgggcgcgatggaaatacctgcgacacagttaatatccaaacggtacaagctccagcggcattatatgtcgatcctcagttcaagctgaattccgccgtctggcaactcaagcctattgatttatatcggctcaactcacataaaaaaaatgggctaacggctcaaatgatttatcccataagaagtattctttgcctgaattatccgccattaggaatagataatccgagctataccataacggctaccggcaaaaatcccacgcagtcgaataaccattttagcctgatgaaagactccgataagcagatccactatgcggttgagctagaggataacactggctccagctttacactgcccggttcctacaccataaatctcaaacaacaaactccaacgggaggcggctggaggaaaaaaatctgctggtcaccaagaatcacgctattcccgactgacagtaccgaacagggcctttattccgatacattgtcttttactattacgccgcactcttgaccgacgagcgtctaaactgagcgaaaaaggctcgataaaaccgagccttcgaaggaattatccccccagataagccgaacgtaccgcttcattggctaataaagctgcaccggtatcttccagtacgatgcgcccgttttccaacacatagcctctatccgccagctttaaagcctgattcgcgttctgctctaccaggaagatagtcatgccttcctcacgaagttgctgaatagtatcgaagatctgcaaaataataatcggcgccaatcccagagaaggttcatccagcaataacaacttgggctgactcattaaggcgcgcccgatagccagcatttgctgctcgccaccggacatcgttccggagcgctggattcgcctttcgtgcaagcgcggaaataaatcataaacacgctcaatacgttgctgatactgctcacggttggcaaagaagccgcccatcgccaaattttcctccaccgtcatgcgagaaaatacccgccgtccttcaggtacgatagcgatagcctcacgcattattcgtgcggtttgccaatcggtaatctcccggtcgaggaaatgaatagtgccttccgtggcgcgaggttcgccgcacagcgtgcccaacagagtggttttccctgccccatttgcgccaatcagcgtgacaatctcaccctgttgaatatgcagacttacctgatgcaaagcctgaattttgccgtagtgggctgaaacctgattcaatgacaacatattaagcctcacccactttattcacccaaataggcccggatgacatccggattattgcgaatttccgccggagtaccctgcgccaacggcgttccctgattcaccacgtaaatgcgatcggaaatgcccatcaccagcttcatatcatgttcaatcaacagcaccgaaacctgatgatgatcccgcagttccataatcagttgattgagctcgtcagtttcttttggattcaagccagccgctggctcatccagcattagcagttccggccgcgtgaccatacagcgagcaatttcgagacgccgctgctgaccataagccagatttcctgcctgccgattagcgaacgccagtaaaccaactcgttccagccatgtcgcggcacgagacagcgcgtctgcttccgcccgacgaaacgccggtgttttcagcaatccggcaaatacgccactttttaggtgctgatgttgtgccaccagcaggttttcaatcaccgtcatttcacggaacaaacgcacgtgctggaaggtacgaatcacccccattcgggcgatagcctgacccggtaaaccttcgagatgacgatcacgtagttggatgctgccaccggttggacgataaaaaccagtcaagcagttgaaaattgtagtttttccggcgccgtttggtccaatcagcgaaacaatttcaccttcatttagcgttagcctaacgttattgaccgccagcagcccgccaaaacgcatcgacagcccttctacccttaacaaaggttgcgcattcatgcctgctccccctgtttttctttcgcatcagctacttttaatttcagctctgggcgtttcattggtaacaatccctgtggacgccaaatcatcattaacaccatcaacgcccccagtaacaacatgctgtaggcattcaaatcacgcattaactctcgcgataccaccagcagaatcgccgccagaatgactgcaaattgcgagcccataccgcctaataccacgatggcgagtacaaaagccgattcgacaaaggtaaaggactctggactgacaaagccctgacgagcggcaaacagcgttcccgcaaaaccggcgaaggctgcactgatggtaaaggcggtcagcttgattttggttgggcttaaacccaatgagcgacaggcaatttcatcttcacgtagcgcttcccacgcccgccctaacggcatacgtaacaagcggttgatgataaatagcgtcagtattaccagcagcagcgctaccagatacaggaaaataatacggtcaccggggtcgtaagccagaccgaagaaattatggaaggtatcccaaccgccatctttggtcgtacgactgaattccagaccaaacagagtcggtttagggatctggccgatgccgttagggccgccagtgatttcagtattattcaacagcaaaatacgaacgatttcgccgaaacccaacgtgactatggccagataatcaccccgcagccgtaatactgggaaaccgagcaaaaagccgaacgcggccgccaccagtcctgccagcggcagactttcccaaaatcccagaccgtaataatgatttagtagcgcgtaggtatatgcgccaatcgcgtagaacccgccgtaccccagcaccagtaagccagacaaaccaaccaccacgttcaaacccaggcccaacatgatgtaaatcagcgttagagtggcgatatcaaccgttccgcgcgataccagaaatggccagaccaccgccgctacgataatcagcgcagccaacagcttttgtctggtggttgtcgcatcaaagctcggtaaaacccagcttgggccagagatcttcttcatgccttgttgcattaacggccgaaataactggaagaaaaacaccacggcacaaccaatggcgatccacatccagcgcacttcacccgcgccgtgcaccaccaaacgcgtgccgtccagcgccaattgtagccccatcagaaacgaggccagcaccagcatcacgaaagtagagataatcgcgttgacgaagttaagttgcttcatactttctcaacctccggacggcccagaattcctgtcggcattaccagcaatacggcaatcagcagcgcaaatgaaactgcgtctttatattctgtactcaaataagctgaggtgagcgcttcagctacgccgaggattaacccgccaatcatcgctccggggatactcccaatcccccccaataccgccgcagtaaaggccttcattcccgccataaaaccgatgtaggggttaattacgccgtagaattgtcctaataacacgccagccaccgccgccatcaccgcgccgatgacaaaggtcagggagataaccctatcggtattaatacccagcaggctggccattttcagatcttccgcacaggctcgacaggcccgccccatacgggaataacgaataaaaagcgtcagcgccagcatggcgaggaaagtcacaatccagatggtaagctgcatcgtgcttatcgttgcagcaaaaccgttgctttcagccagcgtccactgaccagtgaccagactaggcagagccaaatctcgcgatccttgagtcaggctgacatagttttgcaaaaagatagacatcccgattgccgagatcagagcgatcaagcgcttagagctgcgtaccggcttgtaggctacccgttcaatgctccagccataggcgctggcgatcacaatggccacaacaaaagccgaaccgatcaacagccaactggcgtcaatcccaaccatcattagggcggctataacgataaaagagacgtaactaccgatcatatacacttcgccgtgggcaaagttgatcatgccgataatgccgtacaccatggtgtaaccaatcgcgatcagcgcataagtgctgcccaaggtgacaccgttaaacatctgctgcaaaaagtagagaaactgttctgacatagcctaacccttaattctcttgcctggccgcccttcccacccgctccataccaatgatggcaggaaacatcccccggagacgggggatacattgcgggtaaaggggcctgattgccatcacaggcaacctcactgctgaatatttcgtgagtggttatttgacggcggtagaagaaccgtcggcatgccattcaaaaatgccgaattcgaaacctttcaggtcgcctttttcatcccagcttagcggccccatcacggtttcaaccggcttaccggttttcagatctttcaccaaatcggctggctcctggctaccgctacgttccattgctgtggttagcgattgcaatgccgcgtaggtagtccagacgaatgggccggttgagtccagtttcttggctttcagcgcatcgacgataggttggttggcaggaacctgatcgtaacgtttaggcagcgttaccaacatgccttcagaggcggcgccagcgatattggaaagcgaggagttacctacgccttctggccccataaagcgggtggccaggttagcctgcttggcctgacgtaaaatttgccccatttccgggtagtaaccgccgaagtaaacgaagtcgacgttttctttcttcaagcgagccaccagcgttgagaaatccttatcacccgcggtcacgccttcaaacagcacgacgtcagtgccctgttttttcaggctgtcgcgaactgagcgtgccaaaccttcaccgtattgctgtttgtcatgtactacggcaatacgttttggcttaatagtttcgaggatgtatttcgcagcggttggcccttggtcagaatccagaccggtggtacgcagaaccattttataaccacgggtggtcaaatctgcgttagtagccgctggggtgatcataatcacgccttcatcttcataaatatctgaagcaggctgtgtggaagaagaacaaaggtggccgataacatagcgaataccatcgttaatcactttgtttgccacggcgaccgcttgtttcgggtcacaggcatcatcatattctacgccaaccagcttatcgccgttgatcccacctttggcattaatatccgcaatagcctgacgagcaccggtaaattccatatcgccatattgtgccaccgggccagacatcgcaccgacgatagccaccttaatatccttcgctaacaccgaatggctcattgccataaccatacagcccgccagcaacgccttactttttgtcaatttcatccgcgcattccccatctgtcattgtgaacgtactgttgtgtttgccgggccaattcatcgctacttttagtttttatccataagtaataatgatttagtcttttatatggcaatattttctaataagactttatttttcagaccattaaacaggagttttatgctgcaaatcaactcagacaagcagaaacaagcggtgcaaacaagataaaataaggtgctatttgtagggtatttgcacaatcgatagtgggttgtgctggttatcattccatttactaatttttaactcggaaaatgcgcggcgtgaaaaacattttccgccgttcacgtacagaaaaacttacacatgcgcttcctctcagatccagtacactatccctctactttttattcggaatatccccgatgaaattgaccattgagcgcttaactcagctatcacatcaagatcttatcgatctggcaaaaatctggccaaaacagcaacccgccgactggcagagctggattgatgcagatcggccgctatttgccgcacgttttaaccaaagattgctgggagcagtgaaagtccggctgagtgcagagcgggcggagctagaagatttactggtacgggaagtgacccgtcgtcgcggcgtgggattgtatctggtagaagaaaccctgcgtcaactgccagccgttcagcactggcagttgagttatggcgaggtccctggtgttggacgctctgaaatggaacaatttatgctcgcctgtggttttcattctggcgagcagggctggcagcgttaaagccgctggcccatccgccatacggcggccacgttgcgtgcagtaacgcgcagattttcctgcgcttccgctaacgcctcgggtaaagtcacaatacggtttaccacggagaataccgcatctaaaccgtattgatgtactacctgatagtcctgagtcatacctcccgccagagcaatagtcggaattcctagcgctttggcggtccgagccacgccaattggcgttttaccgtgaattgtctggctatcaatccggccttccccggtaatcaccagatcggcaccattcatggcctctgctaaccctaatgcctgaataacaatctcaataccgggtttaagctgtgcgttgagcaaaccaaacaaagccgcgcccataccacctgcggcaccggctcctgccgtttcgatcactgaacgtcccgtcaatgcgtcaatgtgctcaccgtagtggcgcaacgcgccgtccagcgtgctgaccatctcaggcgttgcccctttctgggggccaaatacagcagaagcgcccttcgctccacacagcgggttatcgacatcacaggctacgatgatctcggtctgagccaaccgctcatccaacgccgataaatcaatatgatgcaatcgacttagcgccgcgccgccgccgggcagcgcttcgccctgagcatcgagaaaatacgcgcccagcgcctgcatcatgccagcgccaccatcgttggttgcactgccgccaattcccagaatgattttacgcgcgcctttatctaacgcagacagaatgagctggccggtgccaaaactactggtgtgcagcggattgcgctgttcctgccgcaccagatgcaaaccggaggccgccgccatttcaatcaccgccgtttcaccgtcgcccagccagccgtaaaaagcctgcaccggctgactcagcggcccgctgacttcaacctgaataatatcgccaccggtcgccgcgaccattgattcaacggtgccttctccaccgtcggccatgggtaatttaacgtaatctgcctgcgggtaaatctcgcgaaaaccttgttcgatagcttcagcaacctgcattgccgtcaggctttctttaaatgaatcgggcgcaataacaattttcatcaaatacctcgttaacccgccaagttaaatacgccgaacatcagcgtggaaaccagtgcaatggtgaagcccaccaacgtttcgtatggcaacagtttcaaacgctcatgcacctgcatattgacgctgccgccggttgcatggaagaaactgccgtgtggcatgtgatccagtaccgtcgcgccagcatgtaccatggctgcgccagccagtgccgttacgccaagatccaacaatgttgaactgaataccgccgaagccaccgcggtgcccgccgtggttgacgccgttgccatcgacatcagcgccccggaaatcggcgctaacagataagcaggcatacctgatgccgttaatccttcgatcagtacgtcttttaggccggaatgagcaataatgcccgccaaagtaccggttcccagcagcataatggcaaccggtgccatgcgactcaaaccggaaatcatatagcggttcgattcgcgccagcgccccatgatcaccgcgccaaccaaaccacccagaggcaaagccagcaacggatcgatggtaacacccgcaattgggcgcaaagccaacagcgcgatagccactaatggagccgaaatcgcagcggtaaaggacggaagctggttggtttcatgcacaatcagctcatcggcgttaaccttgctgcctttgtgtttcagatgcttagctaaataataggccacaaccaggccaaacaaaccggggataatgccggcggccatcagagaggtcagtggcacatggaaactgtctgcggccgcaatggtatttgggttcggagacatcacgttacccgccttaccgccgccaatcatcgccagcagaatagccattttggaaatatcggctcgatgagcaatcgccagagcaataggcgcaacggtaatcaccgctacatcaataaatacgcctacggcggttaacagcatagtcgctaccgccaaagccaacagcgcgcgcttctcacccactttgcgcacaattgtttctgcgatggtatttgccgcgccggattcaattaacactccggcaagcacaccggccgccaaaatacgcagcaccgcattggtaatgccctgagcgccgctgatcatcaggctgacggtttgaatcagatccgcaccaccgactaacccaccggcgagcgcgccagccatcatgccgtaaaccggcggaactttacgtaatatcagcacgatggagacaataagtgccaccagcgcgcctaaagctgaaaccgttgtcatgttctgctcccagtgtactttctaattttatttttcagggtaaggagccggcattatgtaaacttcaccggagaaaggcatggtaggattgaccagaaaataactaggataaacgagatgtaattgtagaaagccacaaatcagccgtagatttgcagaccgatatacaagcgcaacaaagaaggtaactgattgatttttaaacccgttatttcttctattttttgcaggcgatagcgtagggtattcacatgaatatgtagcagccgggctgattgagacagatcacaattctgatcaaaatactgttgcagcgtctgtcttagtacacctttaccatccgcagcgcaaagctgcgcccaactggtgcccaattcctctgcctgccaagtccccgcaaactcccctaacaacgccggtaaagagtaatcgttgtaatacagcgtcttatgccttaaccccagccgttcagccattccctgcgccgcacgagcggtgagataagagcgacgaataccttcaacgccggggaattggccaccgacaaaaatgcgcacatcgaaacgcgcctgaagctgagtcacaaagggctgaagctgcttatttaaaggacgcgacggcttatctccagcagccaacgccagcggtttgagcatcactaattggttaaaaccattcatgctaaccagatgatcacgaccagtcgcatccagcacatcaataagctggcgcagagattcatgatctggctgattcagttggataatcagagcgatgcgcggcaaggttaaattcagccccaaataggccgccattgaacctattgatgtgtcttgctgatactcagccaataattggctgactaactcttcccgatagcgtttttcccactgggtttgttccagcaaggcggcctgttccagaatcagctctgcagccattcgcactaactcggcataagcgcgaacctgcgccggttcaccagaaatgccaatgacgcccaccaactgctggtgaaaaataatcggcaggttaattccgggtttgactcccttcaacttggcagcagtagcacaatcaatttctaccactcgattttccattaaagccagcaccgccccctcatggcgctgattaaggcgcagcggatctccagaggcaataataattcccttatcattcatgacattaaccgagtactggatgatactcatggctcgctgaacaatctgccgggcggtggtttcttcaagatggttttgacgcatgggcttcctgtctggaaacgctggagaattaagggaaaacaagtattacgatagtgtacggaaatccaaacgccgttaccgataggcgtctcaaaaaaccgaatattgaaatgaacggatggcagttaaaagctaattcggaagaaaatcatataaaaaatattgatgaaaaccagaaaagcaaaagggcgataaataattatcgcccttttctgtctttacgcggatgttgctcttaggcttcgatagccatgcgtaactttttcatcgcgttcttttcaagctgacgaacgcgttctgcagaaacgccgtacttatcggccaactcctgcaaagtagatttgttgtcatcatccagccaacgggcacgaataatatgctggctacgctcgtccagaccttccaacgcataggtcagtttgtccgctgcgtggctttcccagttatcttcttcaataccatcggcaaaatcagaagttttatcctgcaaatacagaacgggagccatagactgaccgtcgcgtacttcatcgtccggagttgggtcaaaagtcatatcctgcgcggacatgcgagattccatttcacgaacgtctttgctggtcacacccagctctttggcaaccatttcaacttcttcctgattaaaccaacctaaacgctgtttggttttacgcaggttaaagaacagcttacgctgtgctttggtggttgcgactttgacaatacgccagttgcgcagaacatattcatgaatttctgctttgatccagtgtaccgcgaaggacaccagacgcaccccaacttccgggttgaaccgacgaactgctttcatcaagccaatattaccttcctgaatcaggtcagcctgtggcagaccgtagccagaatagttacgggcaacatgagcaacaaagcgcaggtgagacaggattagctgtttagccgcctccagatcgccctggtaatgcagccgttcagccaactcacgctcttcctctgctgtcagcataggataggtattggcagcccgaatataggcttccagactaccttgcggtactaaggctaaagtttgcatttctttggtcatttaaaccctctcatagcatgtgcagatcgtgcataaactctcggcgcgcatattttagcatccggataaccagattcaagcaccgggcaccttatcatttcactgtgctcttcgaccgactaacgccacaaaagttcaatatagatcacagtttcaacgctggatcctagccgataacctgtggatcttaccagtagttattgcctggaaatttgtagaaatggcggtagtcacgatgattatgcttcccctgcttaatcggaaaccgcaggggaagagtatagcaaaaattgcttattgcggtgtaaatcggcgtaaatgttgaacagttgccagccaggcggcgatccagccgatcatggcagaaatcagcaccagcagcagggattcatcccagctcagtccgtgcagagagaaactggtaccgaataccgtcgctacctgcgccactaccgaacccaacttccacaccagtgcttccgacagaattagcgatagaactgcaccacccagacctagcatcgcgccaccgttcaggaatggccgcagaataaagccatctgtggcaccaatcagtttcatcacattgatagtgtcgcgacgactgaaaatgctcaatcgcacgctgttaccgataaccaggaacaccgcaacgaccatcaacacgccgatcatcgccgccacttgcccaaccaggccggtcaacgccgccagtcttgcaaaccagctatcgtccatacgaacttctgccacaccttcaaccttggtgacacgatcccgcagggtatccagcgtttcagagctttggaaactcatttgcggcgtgatgatcgccaccgctggcagcggattctcttccagcatatccagcgcaccgccgaaacctgaccagttgcggaactcacccatcgcttcttcccgcgacagataattcactttttccacgccggcttctgctttcaatgcggttaccacattttccgcagcgttatcgtcaagagacttatccagatacaccgtaagctgtggcgtcgggtaccactgttcagcggcggtgctgacgttcttccaaacgatatagcatacactcggcaacgtcagagaaatggcgatcaccatgaccgtcagcagggtagccagaggctggcgcatcatatcggccaacgcattgacccatgaataacgccactgttcgcgccagccgcctttcaacgctttggtttttgctttctttgcattattcgccatgacgcgctcctgacattcttccctgactgagcgttagaatcgggtaacgacgccgcgcaatcagcgaagtatcgtgggtggccatcaaaacggtcacgccaacacggttaaactcttcaaacaggcgcaaaataccttccgacagggcttcatcgaggttaccggtaggctcatccgccagcaataccgccggcttattcactaccgcacgggcaataccaacccgctgctgttccccgccagaaagctggatcgggaagtttttcgctttatccaataagccgactttatccaacgccgccgatacccgacgacggatatcttcggtactggcaccggcaataatcaacggcatcgcgacattgtcatacacggttcgatccagcagcaaatggtgatcctgaaagatcatcccgatctggcgacgcagaaaaggaacctcgcggtttttcaaccggctgatatcgtggccgccaaaccaaatgtggccggcactaggccgttcgatgccacaaatcagtttgagcagcgtacttttcccagcgccggagtggccggtcaaaaacgccatttccgccgggcgtagatgaaaatctaccccttgcagcgcttgtcggccgcccagataagctttactgacctgttcaaagcgaatcatccgtattaatcctctcgggcaaaaagagcctcaataaaatcgtcagccttaaatggccgcaaatcttcaataccttctccaacgccgatatagcggatcggaataccaaactgatcggcaatggcgaaaatcaccccgcccttggcggtaccatccagtttagtcagggttatccccgtcaggccaaccgcttcgttaaacagtttggcctggcttaccgcattttgtccggtgctggcatccagcgtcagcataacctcatgaggggcatcgccgtccagctttttcattacccggacaatcttcttcagctcttccatcaggtgagctttattctgcaaacgcccggcggtgtccgccaatagcacatcgacgccacgggctttagctgcttgaatcgcatcaaaaataactgaggcggaatccgcgccggtatgctgagcgaccacggcaattttgttgcgctcgccccaaacctgtagctgctcaacggcggcagcgcggaaagtgtccccagcggccagcatgactgatttgccttcggcctggaactgacgtgccagtttaccgatagtggttgttttacctacgccgttcaccccaaccatcagaattacgtacgggttcttaccgctgacatccaaaggtttgtcgactttagccagaatttcggacatttcctccttcatcttgccgtagagtgcttcggcgtctttcaactgcttacgactggcgtgagcggttaaggattcgatgattttacgcgtagtttcgacgccaacgtcggcgatcaggagctgttcttccaattcttcaaacagatcgtcgtcgattttcttaccgctgaataaccccataaaaccagaacccaggttttgtttggttttcagcaagctacgttttaagcgagcaaagaagccttctttcgttggcctttcctgttcttgagccacaggtgccactacaggttcaagctcgatttcgtccaccaattcagactcagcaagcgcagtagtcacttctggctctggctctggctctggctctggctctggctctggctctggctctggctctggctctggctctggctctggctctggctctggctctggctctggctctggctctggcagaataacttcaatatcttccaccgtttcgacagaaatatcagcctctgcttcaaccagagcagactcaggctcgaatacctgcggttgatgctgctccgtcaagaactgagccacagcttcagcaaccagcggctctgctgccggtatcacttcttctgccaatatctctacggattccggttgttcggtcaccgcagcgctaaccggttcgataaccgccgtcgtctcgatctcgttgaattcagccggctctacgtattgagtgggaacaatctcaggctcaattggcgtttcttccaccaacggcactacatcgatagccggggctatttctgccgccgcttccgcgttgatttcgctgtcccattcccccacctccgttggaacaacggattccgctgccggagtaggttcgtcagccgttacaagctcatgctcagaagccgcgggcaggctttcatcaaccactggctcagcgactggctgctcaattttttgttcttctttctgttcttcactctgacggccaagacccagccaggaaaaaaacccacgttttttttcttttgccatttgcgactacactcctcgcggttaaatcatggcttacataaataagataatagctcgccagtctatcactttcccccgagcagcaacacgcgcacgatgctgctttccgttgtgaattcaatcaacaaagcattaacgtttcccctcactgcgcacatcggtagaatagcggctatatcttctattcagcgccgtcaaaatggccacatttcaagcagcgagctatggcaaaaaaaccacaacaacaatccttcgggcagattcgtattattggcggaaagtggcgtggccggaagttaccggttcccgatagcccaggcttacgaccaacgaccgatcgagtgcgggaaaccctgtttaactggctggcaccgatgattcagggcgctcgctgcctagattgttttgccggcagcggcgctcttggtctggaagcgctgtctcgctatgctggagaaaccgtgttgctggaatacgagcgcaatgtggcacgccagctcactagtaatctggctttgctaaacgcagaaaatgggcaagtggtgaataccaacgccctgcaatggttggcgcaaccgggtaaacctttcgatttggtgtttctcgatccgccgttccgtaaaggtttgctggcagaaaccgtcaacctgctagagcagcaaggctggctgaccgatgaagcctggatttacgtagaggccgaagcggaaagcgcggccgcagacgtaccggccaattggcaattacaccgtgaaaaggtcgcggggcaagtcgcctatcgcctgtatattcgtcaccatgctgcgtctgacgcagcgcaggagccagagaatgttgattaatttcggtcgtttactgatgctgggcgtatgggcttttctgatcctgaacctgatccagccattccctagtccgttgaaatattttgtgaatgtcgcgatgatttttatggtgctgatgcatggtttacagctcacgctgctgaaatcaactcagcctaaggatcaaccgattagcggctggcagcaggtcaaaatctttatctttggtgtttttgaactgttggcgtggcagaaaaaacagccgccaatgccgaaaaagtaatttccatccctacgtacttttccaagccaaagctatttggctggctgaacggcggtaaaatcaatatagcgggtgccttgtaaacgcagggtgccctgcataccgatattaatttgttgatattcctgacgaggcaaaacaatattaatttcactgccgctcaggagcgggcgaaaagtcacttcatagcgtttatcttccgccacaatttcttcccgctgacgtgaacgacgattcggcgctaaaacctcacgtttattactaacctcaacctgcaggctgcgcattggagctttatcattctctgcatccagccggcgtttttgccaatactggcgcgtggctaaaataacaatcagtgccacaaccacaataaaaatcagcggtggtttgctcatgaattacacctaataaataaagctgtcgccgttatcagattcagggcttattgcccggtaaataagggaagttcatcacgttggctcccaaatcagagatacgcgcgctacctttttcggtcacgacatcaatacggatgacggaatgaagtggaatatagctacggttgacgccagaaaattcggttttcagtttttctgtcgacggatcaaccaataacgccgattggctatcaaatacaaaatcagcaatctcgataaacccgaacaaagagctgggcgttatttcacggacatagagttgataattcttaccattgttcatgaactgaatgcggtaaagagtttgatcgttcgccatggtgttacctatcgctatccttcgataatcaagctttcaggggaagagaaccggttattaacataccatgaagggcttaaagacgcatccgtgcggttagcgggtttattctgtcgttcgactgtaaatcaggcttgccagcgattgcttagccctccaccggtttacaccattcaccgtgatccatccaatcttcatcagagtcccctttaatccacacttcattgccatactgatgaattaataacgccggcttattttgatcgatattcttcaggtatttattatagacgggatggcggttatttaagatatcggctttgccgtaatgtatcttgccgggatattttcgattatcgacaaaagtgacatagaaattatcattgcgcagctcaattatggcccgcccattcttgaccaacttgcaattataagtaaaaccgggaaattccgcactataggcagcagaacagactgaaagagtcattaccatgataagtaacaatttttcttttttcatttttaatttctggcaaatagcgttcatattaaagtggcagaaataaactgacagctatggcagagtattattattctctaccgcttatataagctcataagcctgcgccaattctcgtatattaccgggttcaatactgttacccattaaacacggggaatattaatagcatctgctcaggctattttctatacttttattaacgaaaggttactttgatgtaacaataaatgctttaattaagttaatatatttatttaaaataattatcacgcttactttagcgtctgtttttcacacactcaagtacgaattttgacctacgaattcacgccgttgcatcacatataaaatcgcatgcaaaaatcattagtaatcgaatagcccctgttgttcatcctgacgatcccctacactgaaaagagacattggctgataattatcgttaccgagcggctattttttgcagaaactttagagaagaaggataaaaaatgagttggccattcctcgctgtatttttttctggttggttgtttgttgatgccagctaccgtgggccacgctggcaacggtgggtcttcaaacccgtaaccctgttactgctggttctactcgcctggcaagctccggtacttgggccagccggctatctgatcgttctcgggctgctagccaccatggctgccgacgctttgctattgctacccagtgagcgcttactttatgccattggcgcattcttcctttctcacctgctgtataccatcagtttcgcgacacagatgacagtcagtattttctggccgctgccgttggtgctgatcatcataggtgcactgttactggcaacaatctggacccggttggaagaaatgcgctggccgatcgcaacctatgtcgccatgacgctattgatggtgtgggttgccggtgaacaatacttcttacggagcaccgattttggcttttcgctgctgatcggcacttctttgctgctgttagccaatattatctggctgatcaatcgctaccgtttttctttcaaagccgctgatgcactggtcgcaggctgctattttgttggtcacttcctgattgtccgctcgctctatctgtaaatatctacgccccacggacggggcgtactggtttcttctttctcctttctgcacaaattcacccgcgcagcaagtccccgtggttaataaatcgaactctatttagcaataattctcatccttctattgactctggagttagctccaaggtgtagagtcctctcatcaacggggaattaactgttccgggggcactatgcattcacatcgcgaccaccaacattcagatgaagttcatgaccacaacaacgaaggtcacgcacatattcatacagccgatacacattgctgtagtgcaacaaatacagcggtcgaagaggtatctcaagctagtaaacactcacattcttccaactgttgcagcagtgccaagcctgatacgtcagggaatgatagcgaattagaagggctacccagcacgggcggtcagcgttatagctggcatataaaggggatggattgcccaagttgcgcgcgtaagattgaaaatgccgtaggcggtatctccggcgtggaacaagccaaggtgctgtttgctacggaaaagctggtggtagatgccaaaactgacgtcagccaacaggtacaaaacgccgtcgccaaagcgggatttagcctgctggacagccccaaatcagggcaaaaaatggcggccaatgaaaataagtttcgcgaatatttaccaataatcgtactgacgcttttgatgttagccagttggggaatttcattagttagcgaagaaagtggccgcatcgcctttatcgtcacaaccgtggtgggattaattcctatcgccggtaaggcactgaaactgattcgttccggcacgccttttgccattgaaaccttgatgagcgtggcagccattggcgcgttatttatcggcgcaacggcagaggccgccatggtattgctgttgtttatgttaggcgaactattagagtcttacgccgccaatcgtgcacgacgaggcgtttcagccctgatggcgctagtaccggaagacgctttgctactcaaaaatgggcaacggagtctggttcctgtcagcagtttacggccaggagacgtaattgaaatcgcgccaggagcgcgtctgccagccgatgcagagctggttacaccttttgccagctttgatgagagtgctttaaccggcgagtcgattccggttgaacgacaacaaggtgaaaaagtggcggcaggcagcctttccatcgacagatccgccgaaatgcgcgtaatttccgagccgggtaataacgccattgaccgcattttacagttaattgaagaagcggaagaacgccgcgcgccgattgaacgctttatcgatcgctttagccgcatttacactccattaattatgctgctgtccgttttggtgattttgattccacctatgttctacggccagccttgggaaccttggatttatcgaggtctaaccctgctattaatcggctgcccttgtgctttggttatctccacgcctgcggccattacttccgcactggcggcggcaactcgtcgcggcgcgttgattaaaggcggagcagcattggagcaacttggcatcattcaaaccgttgccttcgataaaaccggcacgctgaccgaaggtaagcctcaggtgaccgacgtactgccggtcaatggcgtgactgaaaatcgcctgttaacgctaaccgccgccgtagaagccggttcccaccatcctttagctacggcaattttacagcgcgccgcgcaggaatcgacttcgctacctcccgcagaggaacgtcgggcgttggcaggtattggcgtcgaaggggtcgttaacggcataaaaatattggtgagttctccgggcaaactggctccacaatcgctagataaccactggcaaacacaattggatcagttggaaagcagcggcaaaaccgcagttgcggtgctggaagaggggcgctttattggtctgctggcgctgcgggatactctgcgcacagatgcaaaacaggcgattaatgcgttgaaaaatctgggtattcagggcgtgatgctgaccggtgacaatccgagagccgcagcggcaattgccaatgaactaggcatcgactatcgagctggattattacccgcggataaagtagaggcgatcaccgcgctgaataaggctaaacccacggtcatggtcggtgatggcataaacgacgcgcccgcgatgaaggccgccagtattggcgtcgctatggggagcggaaccgatgtggcgctggaaaccgccgatgcagcgttgacccacaaccggctgaccggattagcggaaatcatcgtgctatcacgtgccgctcgcgccaatattcggcaaaacatcgctattgcgctgggattgaagggaattttcctgattactactttgctgggattaaccggtctgtggctggcagtgttggccgattcgggcgcaacggctctcgttaccgccaacgccttgagattactgagaaaacgcgaaatttaaccgggtagaattttatccgaatattgttcactcccaaggctctgcacgagccttggtttttttcctgactaagccttaatgcccttacgcaccagataacgataaggggcagtctccacttcctgtgccaccagttcatgatccataaagcggcaaaatccgggaatatcgcgggttgtggcaggatcgtcggcgataatcaacaaagtctgtccttcttccatatggcgaaccgttttccgcaccatcattaccggttccgggcaacgtaggcccagcgtatcaagggttttatccggatgggcaaaaagatctgtcattggttttctcttatcagcgattgagcaaattttaatctcggcgggaagtgcccgatgaagggcagctagtttactccgcccattttgcggtgcaagctacgctaacgtttgcgctaaaattaaccattgcattcgttgcgcaaacaagtattatgccgccgcgccgtagaaactgcgggcacattttgtttgggttccctcaccccaataaccaaaaaggtcacatctatgttttcgtttacgccccaacagcggatgaccgctttggtatggctttcgctattccatattgtcatcatcacatccagtaactatctggtgcaattaccgatcgctatcttcggttttcacaccacatggggagcttttacctttccctttatctttttagctaccgatctgaccgtgaggatttttggtgcgcctttagctcgccgcattattctctcagtgatgttacctgcattggtaatttcctatctggtttcagccctgttctttcagggaagctggcagggattccccgcgctcactagctttaacgtgatggtagcccgtatcgccgtagccagctttatggcctacgtattagggcagattctggatgtacaggtatttaaccgcctgcgtcagcgcagcgcctggtgggttgcacctacggcagcgatgttcttcggcaatatcagcgatacgctggccttcttctttattgccttctataagagcagcgatccctttatggcggccaattgggtcgaaatcgccttggtagattatacctttaagctactgatctgcctcctattctttcttcctgcctatggtgtaatgctgaatatgctgctgaaatatttcgccagtagaacggcgtcgcagccagcggtacaaatcggctaatctaccacctgccggttaatggcggcccgcctacggccgccagattcttctggaattccgtgtaatacctgcctactcacaattctttaccgaggagcctgttgcttttatccgctgaataaggtgcgatacgggtcattcagtcaaggttaaagactctcatccagaaggaattcccatgaataagatgaccaaacttttcgccgttggtttattggttaccgggctaagcgcctgcgatgtcaaaaacgacaacaacgttggccagccggtgagtttattggagggtaatatcgccctggttctgcccaccgaatttaccgatcaaagcgataaaatcagcagcccttccagtaataaacgcgtttatgcgaccaaaaacggtgaaaaagccgtagtgatcattttgaatgaaaaagacaccgccggtttggatgtattggctcagcgtttgatcgaacagcaaaaaggtcgcgatgccaatctgcaaatcgtcaccaataaaaccattcaggttgacggcaagccgttgcagcaactggatagcattatcaccagcggcggccagaaggcttattcatcggtcgttatgggtaacgtcgataacaacagcatgacgctgcaaattaccgttccagccgaaaatcaacagcaggcgcagaccgaaactgaatccattatcagcaccctgaagctgaaatgaatgcagataatcccgcagcggagttgtaacgctccctgcggggttttctcaccaaatttgagcgccactgcggcgctctgattgtttacgctaacgcgcgagccagtagcgtaatcggatgctcacatttcttgctggtcgacatttcaatctgccatttacaggtttcacaatccgtaatcaccaaatctaccccgctctcctcaatctgacgaaataacgaagcgccaatgccttgcgaagtggcgtaattctcagatttaaacccataagtaccggcaattccacagcattgagaatccagcgtaatcagttcgacgccgggaattcgacgcagcaacgccagtgtataagcagtccagcccattttctccatatgacacggcgtatggtaagcaatgcgcagcggcaggcgtttcagcggtaattcccgcccctgatccagtaaacggtaaagataacgagttgccagttcaacgcgatcgcgcaccggcgtggtatccacatccaataaatgaggatattcatctcgtagagtaaaagtacagctggaagaagtggcaaccaccggaatatcccgcgtgatgaccgcatctgtcagcgattccagattaactttagcctgctttttagcctgatcgataaagccgttggcaatcaaagggacgccgcagcacttttctcgtttgagcaactgcacgccgatattcattgcattgaaaacgctgattaaatctttccccagctgcggatgattgtaattaacaaagcagccgtggaaaaacgccacctgttcggcatattgttgctgtttagccgcctgctgacgataccagcggcggaaagtaccaaaagagtatttaggcaattcacggcgatgatcgattttcagggctttatccagcaagtgacgcactggttttaatccagtgatagcattcactaccggtgcaaatggcgtcgacaaagagcccattaaatcggtatggcttaaaatagcgtcacgcagttttggtttattactgctgtaactggctttagcacgttgaataatgtcgccgattttaacgtcggaaggacaagccacttcacaacgtttacagttggtacaatatttcagcgcttcgtcatacagcatcggatcttttaatcgcagacgttcgccatcaggccctgcctgctttggccccggataaagcggattgaccttggctaccgggcaataagtggtgcataccgtacatttaatgcagctttcgaagctgttatcccgcggcaaactcatagtttaacctccgtggcatcggtaatctgctgagcagcgaacaaagcactggttaatgacacaccggcaccgcagccttgctgtagggggtcatagccgcccaacaccgctccaatcgcataaagattttccaaaggctcgccgccgcgcatagcgcgtaactgcttatcggtctgcacgccgaactgtaggtaaggctgagcatcaaacatgtcgctgcgactccagtccgcccgattactcagagaaagcatatccagccctaaaatgggttcgtaaacccgatcgaatccggcaatcaatccgttgctaaagaaactgccgctcgccagtacgacatgaggcgctcgtagcggaatatctccgtggttacggctatacaagccggtgacacgattaccctcgagttcagctcgtagtaccgaatctcccggcatgactaacccaccaagatgttgaaaacgttggcgtaattcctggtgcagacgcatacccaataacgatggaggcagagtcggcaatagcataatcggcttgccgaccgccagtcgcagggcttccaactgtaccggattatccagaccgatacaggcgggcaataaaatcgcctgagcgtgcgtagacaagcggctcaattcttcagccaagggaggcaggctttccgccaaatccaaaacgcgggcgatattcaccgcgcgaaattcactaggattatcacgcagccgatctaatgccggcaaatgcatatagctggacgtcgccgcgacgccctgcgcctgtaaggaatccgccaccatctgcggctgaaaatcgaggaatccttcaataccgataacggcaattcgctcccaaggtaaagttccgttcaacggtgtagtgggaatttctgcaggactgagccacgttgggcgttgactgcccagcggcgtaatgcgcatgtggttttccgccgcactaccgacaaaagaaaggtggcaacgctccagtaatttctgcgcttcatccaccagttcgatgaccaccgcccccattttgctgtaaggatgctcaggtgcctgtgccgccaaggcttctaatgccgtaagaggctggcgcacttcgctgccatcaggcaactgagccaaaagatcgagagaaccggatgaaaaatgcagcgcactttgcccggcgctgacgatggcgcaagactttccctgctccgccagacgaataccgcaggttagccccgccagcccgccgccaatgataatggcatcaaatttcatcgcttttctcctgcgccgatggaatcgcggcagtctggtgacccagcccgcacagtccttgatatacccaactggtaaattcactttcccgcagcgcatcgccccaggcaattggacggacgcctttccagcgctcgttgaggaattgggtcagttgctcgcgagattgctgtggcgtggtgacattaaaacgatttagtaagccagcggcacgacaggcgcagagttcaccctgacaggttcccatcccgacgcgagtgcgtcttcgtaaatccaataaattgtttaccgtgagcgattcgacggcataacgcacttcacctgcggtcacagcttcgcattcgcataccaggctattatccagccgattaccgtccaataattgagtggctctatctccgtgacgataaaccgcagagccgcgaatactggctggcagagaaacaaccttacgtaaagtctgttctgcggactggcgagaaccgggcagcggctcttgtgccgtggtgcaactggcctgatgccccagtttttcacacactttatccgtcgcccattctgccattaaccggtaagtcattaatttgccaccagtaatggtgataaaaccctccagcccatcgcggctggcgtgatccagcaaaacaataccgcggctaacgttacggccgctcggatcgtcgtcgctggcgaccagaggacgaacgccagcataggcgcgtaaaatgcgggttgccgccagtttcggcgacagtttcgatccttcccgaatcaaaatatccacttcctgtggcgtgacgatcatgttgtctatctggtcataatcaatatgcgttgaggtcgtaccgatcagtgaaatagtgtctcccggcactaaaatatcggcgtcggccggtttgcggcaacggttaatcaccatgttattaatgcggtgccccaaaatcagtaacgcgcctttcgcagggaacattcgcactcgcagatcggcatactcggcaatgtgttgcccccaaatgcctgcggcgttaaccacgattcgggcatgaattttatactggcgctggtttttgtgatcgaaaacgctcacgccggtcactcggtcaccctgacggataagaccaataacttcatgatatgtcagtacattagcgccatgttcgcgagcgtccagcatattggcggcggtgagacggaaagggtcaacggtgccgtcaggtactttaactgcaccaatcatggccggattggccgccggttccattcgcagcgccaacgccggatcgatcgcttccgcgtcaatacccgccaactggcagcgggtgataaattgctgctgatattcgagagaatcttctggcagcgtgataaacaagccattggttggttcaatacagtggcgggcaatacgtttgaggatacgattctcttcaatacattctttggctgattcgccgtcggttaccgcatagcgcgcgccgctgtgcagcaagccgtgattcctgccagtcgcaccggtagcgatgtcgtgtcgctccagtaaaatacagcctaacccacggcgggcgcagtctctagctatgcccgcaccggtggcgccgccgccaatgatgatgacatccgtttcgctgtaaggagaactgttcgtcatgaaagaccccactctatagacaaccgcctggcggtcaattttacatctattgagacacaataattagggtcattgtttgataaggaacaaaaacgaaccaaaaacgaaaaccaaatgatggataaaaaccatgattgtgatcaaagtcacacaggagcacccactttttatttcaaatcgttaaccaatcgctcaaaatcgcacccgcttacataaaactgtaacaattgcgccatccctcacagataaacaacgcgtttttatctagcattgcgctcgttatagaacataaacgataaccaggttggcagttcaaccacccgctagacaccaggctatgctgggatcaaaaagtacgtataacgccattggaggcactcatgttgagtatatttaagcctgcggctcaccaagcccggctgtcagaagatcggattgatccgacttatcgccgattacgctggcaaatatttatgggcatcttcttcggttacgctgcctattatttggttcgcaaaaactttacattggccatgccgtatttgatcgagcagggcttctcccgtggggatttgggttttgccttatccggtatttccattgcttacggtttctctaaatttatcatgggttcggtttccgaccgctcaaacccacgcgtgtttctctccgccggtttgattctggccgccgccgtgatgctgtttatgggctttgtcccttgggctacctccagcattgccgtgatgttcgttctactcttcctgtgcggttggttccagggaatgggctggcctccgtgcggtcgaaccatggttcactggtggtcgaagaaagagcgtggcagcatcgtatccgtttggaactgcgcccataacgtcggtggtggtctgccgccattgctgttcctgctggggatggcctggtttaacgactggaaagccgcgttatatatgcctgctttcggtgccattttagtggcgttgatcgttttcggtctgatgcgcgatacccctcaatcctgcggtttaccaccgattgaagagtacaaaaacgactatccagacgattactcgaaagaagcagaagaagaactgacggctaaacagatcttcatgcaatacattctgccgaataaattgctgtggtatatcgccattgccaacgtattcgtatacctgctgcgttacggcattctggactggtcaccaacctacctgaaagaagtgaaacacttcgctctggataaatcctcatgggcctatttcttgtatgaatatgccgggattccaggaacgctgctgtgcggctggatgtccgataaagtgtttaaaggtaaccgcggtgcaaccggcgtgttctttatgatactggtcactattgccaccatcatttactggctgaacccggtcggcaacccaggcattgatatggcctgtatgatcaccatcggcttcctgatttatggcccagtaatgctgattggtctgcatgcgctggaactggcaccgaagaaagcggcaggcactgcggcgggcttcaccggtctgttcggttatctgggcggatcggttgcagctagcgccatcgttggttataccgttgacttcttcggttgggacggcggctttatggtgatgattggcggcagcattctggcggttctattactgatcgtcgttatgttcagcgagaaaaaacatcacgaagagatggcaaaaaaccgcgctaactaaggctcggtagtcaatctcagcgtttcaggccgtgccgttatctttggcgacacggccttttttgtaccctaaaaccaaaagtggagtaggtaaaccatgcaaactcacgttaaagccttggtagctggcattattctggcctcatcaatggccggagtagctcaggccgcagagaaaattgtcatcgcacatcgcggtgccagcggctatttgccagaacataccttaccgtcgaaagcgatggcttatgctcagggagccgattacttagaacaagatttagtgatgactaaagataatgagttggtggttttacacgaccattatctggatcgagttaccgatgttgcggagcgcttcccagatcgggcgcgtaaagatggacgttactacgccattgattttactctgccagaaatcaaatccctgaaattcaccgaaggttttgatatcaaagacggcaaaaaggtacaaagctacccgggccggttcccaatgggtaaatccgatttccgtgtgcataccttccaggaagagatcgagttcattcaaggattgaatcactcaaccggtaagaatatcggtatctatccagaaattaaggcgccgtggttccaccgtcaggaaggaaaagatatctctgccaaggtgctggacgtgctaaaagagtacggttacaccaccaaaggagacaaagtttatctgcaatgctttgatgccaatgaactaaagcgaattaagaacgagctggaaccgcaaaaaggcatggatttgaaactgattcagttggtggcctatacggattggaatgaaacctatgaacaacagccaaacggtaagtgggtaaattatagctatgattggatgttcaaaccgggcgcgatgaagcaggtcgcacagtacgctgacggtattgggccggattatcatatgctagtggcagccgaatctacgccgggcaagattgtgctaactgagatggttaaggatgcccacgccagcaatatgatggtgcatccatacacgattcgcgccgatgcgttgccgaaatatgccaccgacgtcaatcagctgtacgacattatctacaatcaggcgcaggttgacggtgtgtttactgatttcccagataaaggcgttcagttcctgcaaaagcaggggcagcataagtaaccaaaatatcagggcgcatttttatgcgccctgtccatcaaaaataagccacttgctcttttgcttgaaagatctgagctaaatagcccttaaactgttcggtaatctgttctgccgcatcattcatatctatataggtggttgccagcactagcccatcagcgacagaaaatatcactttattgccgtagttataggacaaaagttgtagcaaacaatcgtattgctgaggcactggagcaaacgggcaaatcaattctgcgttatcatcctcagtatcaatataaacaataaattcgtcatttatattaatataattatcttctccatgaggagtggtggcaaaatattgaagtagtaattgcgagctttcatccatgactgtacctatttattataaggagctaatccacgaagttgcttaaccaggtctgtatcatcgacccgttttacggcaacatttttgattttatcaaaagctttactcccttcggtatgcatattagcggcttgaatttgaaggttactgctatttaatgcgaccattttataaagtgctttcccatcaaccgataattccctactaggagagagcgaatggttaaaatgtaatgatgccaactcacgcttaacttctatatcaagtaaagccgtgcgatctttaccacttttacaattccaacaaggcgtcacaccaatagcattggaaagtaacactattcgcctgacaaatttatagggatcaattttattagagtaagatttatcatgccacatttccattaactgcctcgacagttctctaaccaattttatattattatcatccggtttatttttcgtattaataagataatcgcccacccagccgcctggtttagagatgtccagctcatcacctagcattaattttatagagggttcattgtattgatttgaaacctcccaagacttattctttggaataccaaatccattagggaatataggtagaaaggccattgaattaacgccaaagttaaatgcggccaactgtaaattcattttaatttcttgttgcttcccactcgcgtcgcgtatatataaaactaatggcttggattctgacaatgttttccaagcgcccatctgtatcgttaactgagtcccttccgtgtccttcaaaaaatcctgcgccgtcagtaagctagtagaagttaaccgcaaatcaatcgtctctccattcagagccttttgcagcttttctggatgctggaacaatgcggcaagaacgacttcgcgtccgcgttcaagcgctatcgattgactgtcttccttgctaattttcacgctatgcggaccaagagaggcatgtcgaatcccctcgagcaaaatctctggccgcccgttcttctgtaacgaaaacttagacacccacaaattaactgcgtgctgagaattaccgctatcagcagaacaaacgccaccatttttataactagtggggaatatgtcatcctctccctgctcaagtttcaattgaccggcaggtattgactcactaataaatttgcatcccaaatagtcaaactgagacttttgtatattccactctgccgtattcaataatctgatactggcttgtttaaattcccgcttagcattctctttggctaacttagcgttcattccttgttctttataaaattgagtgagaacatccataacttctttcttacagtgtttaatactgtcgtattcagcattgctaatgggctggttttctaatgacgtaggattttttaaattattctttttaaattccaaatccattgtggcttctaactttccataaaaaccattggaatcatcatctttcaaaacatccagagccactttgatataatctaattttaattggcgagtgtctttagcataattcaatatatgatctgaaaatgaactttcttttgatttatctctggcatgtttttttatcgtcatgcttttttgttcaaatttatctatcgctttatctttcgcctgtaggtcaccctcaccgtttcttatataatgttgacaaagaatatccacaatttcattctcgtgctgtgtaacactaatatcattagtaatatcagtcgatagttcgaacgatggttctatatctcctaattcttttgaaatggtatttatctttttgataaaaggcattttttcgagagaatagccagtggcggatttatcattatccgggatcaacacctcaagagctatatccgcatatctcaactttagctgtctgattgaactccttattgtatcaaccgactctgatttcttctgatggatatagctaacaccagcaatattttctggcttacgcggaggtgaagaaccaaaccctaatattttcttgttctcactcttttcaactttatcatatgaatgattagatttagttacattattatttatcgcaaagtcgtttgacataggacctccacacatcaataaatgcaaaacaaactatattgcagttaataatgtttttttggttcgagtggaggatataacaaaacaattttataagtactgagaagggaaagaaattcagggcgatagaacatcgccccgtttgagcgttaggctaaaaacattttacgcagatagtgcggtactgcgtcgtcagcgtttgaacctatcacttccagatccggtaaaatatctttcagacgttggtgagcatcacgcatgatgcaacccttaccggccatcgacagcatttccaaatcattcattccatcaccaaaagcgatgcattctttcagtgaataaccgataattttggatacctgctccaatgcatggcctttagacacaccgccgcccatcacttccagacaggttgggaaggaaaaactgacgttcacgcgatcgccccaacgagcattgatggcttcctccaaaatcagcagcttatcgtgatcttcgcaggtgaaatacaccttgcacacgccttcggtcggcagtaatgcaggttcgaatagctgataggtgaacaccgattcacggaaaaactcttcctgctccggactttcgcgattcatataccaatcgtcgtttaaataaacgttggtcagaatatccggattatcgtgctccatgctgtatagatcgcgggcgatatcaccatccagattatggctaaaaatcagctctccggcggtgttatgtacgcgcgcaccgttagaggtaatcataaaggcactgatctccagactatcgcgaatctgtgacacatcaatatgatggcgacctgtagcaaacacgaaatgcacgtcacgttcggtcagtagcttcaatgtctctttagcgtaaggagtcaaaatgtggtcaggggacagcagggtgccgtctaaatcggaagcgacaacatgatacatagcggtatgttctaacctctggtggagttggcgtcagcgtcgacgctcagttgatgatgttgcgcaaaaaaacgcaatatggcgcttaacgcctctacacgcagcttgtcccgctcgaacaggatctcatggcgtgctcctttgatgactctgggagcgcccccgtcacagggatgcccagcctgagccattacctgacaaaaagcgtcctgagccgggtttgataccacccgatcttcactggcctgcaacaataatattggcgtggtgattttatctgcctcggcgattatctgctcgctggcacgcaggctttccctcacccagtgataggtagggccgccaacgcgtatttctggcgtatccgcgtagtgacgtaggcagcggcgatagcgctcgcgactgtgggtcagcatattcactacataaggcaatggccgccactgaccggtgccaatcgcgtagtaatcccgcatgttctggcgcttttcggcccaatcgacaatgcggtgcgccagccatttcggcataggtagatgaatacccaacatcggtgcacaaagcgccgcagcatcaaacgccgtcggttcccgggccagatagcgtagcagaatcgcactgcccatcgagtgagccagcgcaaaacgttctagataatggctattactgatttcccgctcgacccactgagcaaaatcttccacatagtcatcaaaattaacgacgtggccacgattaggatcttctagcattcggccagaacgcccttgaccacgatgatccagcaccatgacgtcataaccttgctgaaacagatcgtaggcaacttccggatattttacgtagctttcaatgcgacccggaaccaacatcaccactttgttgtgatgaggggaacggaagcgaacatagcggataggtacattatcgacgccagaaaactcgtcttcttcccgctgctgccagaaatccagcaaaggcccgttagcaaaggcggcaaatcgcgcttcacgggttaaccagttttcagtttttttctctaacggcatagggttgttaattgcatccttaaaccggcgtcctgtggtttttccgagctatagcagatctaaaaacaatagcgtattgtggcataaatttactcattcagggaattttgccgatgaccttcgactggtggctaacctatctggtgacaacctttatcctcagcctgtcgccgggttctggtgccattaacaccatgagcaccaccatcagccacggtaaacgcggtgttgtcgcatccattgccggcttgcagcttggcctggcgctgcatatcgttttggtcggcattggtctgggcgctctcatttcccaatccctgctggctttcgaaatactgaaatggctgggagcggcctatctgatttggctgggtattgtacagtggcgagcggctggcgctgtggatcttcatgcgcttgccactagtctgcctcggagaaaactgttcaaaagagcgattttcgtcaatctgaccaacccgaagagcattgtttttctggccgcgctgtttccacagtttgtattgcctcatcagccgcaggcggcacaatatctgattctgggcgcgactacgttgatagtggatatcatcgtgatgattggctacgccgcgctggctacgcgaattgctggttggattaaggccccgcaccagatgaagttgcttaaccgtattttcggcggtttatttatgctgataggcgcattgttggcgacagccaaaaaagtgtagccgagaagtgaatatctggccggaatactagtgatccggccagtaagggttatttcgaaaatatcagatgcaatccgaaaccaacaaataatacgcccgccaaaccatcaatccatttcgacaaacgctggtaaccgcggcgcatcaccggcagggcaaatacacaggcaacaacgctgaaccagataaaggtttctgcaacgatcaggataaacaatccccaacgtgcgccagcgctgacgtcatctccgacaaacagcgagaatacgctgccaaaatagatcaccgctttcgggttagataagttggtcagaaagccgcgcaggaaagtacggccgcggactggcagcgtcatttctacctcgccttcccccagctcgcctttggccctggctgatttcagcaattgccagcccatccagcacagataaagcccaccgccgaccataataacctgatgcagccacgccattttttgcagaattaaatgcagccccatcaaggccacgcctgcccaaaccacaattcccagagatattcctaccacgcccatcattgcttcgcgacgggaacggctggcggcagtttgagaaacgaaaaagaagtcagggccggggctcatcaaggcaataaggtgaaccaacgccacggtaagaaaaagcatcaacatgaagataatccgacaggaaatgagagaagaaaaaccactgtatcacgaggacggcagcccaaccagactgccgtttatgctttatattcaacgctggcaggcgctattcatcgttatccacatgatcgcgaatcatcgccataaatggcgcgccgaaacgttccagtttacgctgccctacgccgttgacgctgagcaattcgctggccttaatcggcatctgctccgccatttccagcagcgtcgcatcgttaaagacgacataaggcggaatgttttcttcgtcagcaatggacttacgcagtttgcgcaatttggcaaacagtttgcgatcgtaattgccgccgtaggacttctgattagcgctgctgcgcggtttcaggctttgaatgcgcggcaccgccagttgcagcggaatttcggcacgcaaaataggtctggcggcctcggttaattgcagggcggaaaactgcgcgatattctggctgagtaagcctaaatggattaactggcgcagaacgctcacccaatgctcatgggtttgatcccggccaatgccgtacaccgaaagtttatcgtgccccatttcgcgaatacgctgattattcgctccacgcagcacttccacgatatagcccaaaccaaagcgttgcccaacgcgatacacgcaggataaggctttttgagcgtcacccagcgcgtcataacgtttcggcgggtcaaggcagatatcacagttgccgcaggcctgttgtttcccttcgccaaaataatttagcaataccaaacggcggcaggtttgcgcttcggcaaaagcccccatggcattcagtttatgacgttcgacgtcctgctgagcaccggcaggcttttcttccagacagcggcgcaaccacgccatatccgccggatcataaagtaaaatcgcttccgcaggcaggccatcacgcccggcgcgccccgtttcctgataataagattcgatagtccgcggaatatcaaaatgcaccacaaaacggacgtttggcttgttgatacccatcccaaaagccacggtggcaaccaccacctgtaaatcatcgcgctgaaacgcttcctgaacctgggcccgtcgttcgttatccagaccggcgtgatacgcggccacgctcaggccgcggctttgtagacgcgcagtggtatcttcaactttagcccgactattgcagtaaataatgccgcttttaccacgttgatcctgcacaaagcgccagagctgatccagcggcttgaacttctcaaccaaggtatagcgaatattgggccgatcgaaactgctgacctgaatcagcggctgattaagatccagcaaccgaacaatatcgccgcgcgtggcttcatccgccgtggcggtgagagcaataactggcaacgcgggaaaacgacgtttgagctgacccagagcgcgatattccgggcggaaatcgtgtccccattgggaaatacagtgagcctcatcaaccgccagcagcgccggacgccaatgctcaagctgttcgaggaagttttccatcactaagcgctcgggagcgatatacagcagtttaatctgaccactgcggcaaccttccatcacggccagttgctgctcgcgagtttgtgatgaattgagacaacccgcggcgacgccgtaggcctgaagttggtcaacctgatctttcatcagtgaaatcagcggagaaaccaccagcgtcaagccatccatcaccagcgccgggatctgataacacaaggattttccgccgcccgtcggcatcaccaccagacagtcctgcccggcgagcgttgcattgatgatttcttgttgccctggtcggaattgttggtagccgaaagtctctcgcaagacctgcgctgccagctgttccttatttatcactgccgcggtagacactcgtttccccaactcttggatctgaacaggccggttaaccggcctgtatgtgattctgcactcacgccaaacggcgttacatgacgtcgttcaacatgatacccacaccgacacgggtttgcctaaagttatagtcaatcattgactcaccgtagccgctgaacacctgtgtgtagaagcgaacatgcttggtgatggggtaactccagcccatttcagccgcgccgtagccggaattccagttatagcgcccttccatgctaaatacactatcgccccaggcataaccgactttcaggcggtagtaacccaaatatttagtgatatctggattatcatcttttgcatcattttccgagaagcgataccaaggtttcagatctatctcccaatctccgcgctgcgccatcacgcgcgcataggcgcgatcccagctacgagaagttgggtctgctttaccgttagattggtggttcaaacccacttctatttcgcggaaagtccagcccgcaaagtcataatccgttgcccaggccaggaatacctgcggctcatagttagtttcgcggaatggcgaagattccccgctgttcgaagcctgccaccacgaacgctgagtgtaggatgcgcccaacagagagttttccccggcaatgccacgccagatagggaaccctaagctcagttggaatttaatctcatctttacgggcattttcggcccaatcataggaactaatggcttctttattgatattgctggagtaggtataaagcaggtaattggtttcgtacggatatagcaggaaaggattatcgtggtcttgcagcatggcggcaataatacttccacgaatcgcaggcgcatcatgaatcttttctaccttggcttcctcagcctgtgctaaaaccggcacaaataacaataccatcaatattcgccaaaagtgtcccatcattactctcatcgcctcatagattattcgtaattttaatgaaaagcagctcattctacacacaaatggcagtctggcttagcgttgtttatttttatgaatccgtcactagcgcgcaacaagttatgggcataaaataaacatttagttaacagccgccgtattattatcggctacgaaagtgagaatcaagccacatgtctggaaccatattaacccttgaagaagcgcgccgcttgattggcgaagtttttgtctaccacatgccgtttaatcgtgagctaggtctggaattacgccgctttgaacaagattatgcagagttagcctttagtcatcaggatagattagtcggaaatatcgctcagcgcatcctgcatggcggtgttattgcttccgtactggacgtcgccgccggtctggtctgcgttggtaacagcctgacacgttacgaacccttgattaaagagcagttacagcaacagctatctaaaatgggcaccatcgatttgcgcgtggattatttgcgccccggccgcggcgagcatttcaccgccagcagcagcattctgcgcagcggtaataaagtcgctgtcgctcgcgttgaattacataatcaggatgcggttcatatcgccagcgccactgcgacttatttagtcgggtaattgtcttttttcagtgagtaaacgccaatgatgcttagctacaacaagttaagtacactcaccgtatcccttttttgttcagagctattccatggataagcaacaaacgcgtcagggcattttctttgctctggcggcctattttatttggggtcttgccccggcctatttcaaattaatccagcaggttccggcagatgaaattctgacccataggattatctggtcattcttttttatgctgattctgctcacgctgagtcgcaattggccacaggtacgccaagcctgtcggaataaaaaacgcctgttattactggcggtcactgcactgctgattgccagcaactggctgctgtttatttgggcggtcaacaaccaccacatgctggaagccagcctgggctacttcattaaccccttggttaacgtattgttcggtatgctatttctaggcgagcgttttcgacggatgcaatgggtcgcggtcgcgctggcgtttggcggcgtgcttattcaactgtggcagtttggctcgttaccggtgattgggctggggctggcgataagcttcgcgctttacggcttattacgtaagaaaatgggcatagacgcgcagaccggcatgctggtagaaacgctgtggctgttacctattgccgcagtatatttattcttctttgccgatagcccaaccagtcatttgagcgctaacgcctggtcgctcaatctgctgctggccgctgccggtgtgattaccaccattccgttgctgctgtttaccgccgctgccggccggttgcgcctctctacgctgggctttttccaatacctcggcccaacgctgatgtttgtcctagccgtcactttctacggtgaaaccatcagtaacgacaagatggtgaccttcgggtttatctgggcggcgctgctaatattcacgctggatgcgctctatacccaacgtaagttacgcaaataggctgcgacgcccgatgtagcctcatcgggcgctcacacagtttgggccttacagccagtttttacgtttgaagtacagataaggggctaaaccggcgacgatcatcagaccaatagcccccggatagccgaatgaccaacgcagttccggcataaattcaaagttcataccgtagctcgaagccaccagcgtcggcggcaggaagaccacggagaccaccgagaagattttgataatccggttttgttcgatgttgataaagcccatcgccgcctgcatcaggaagttaaccttttggaacagggattcgttgtgcggcagcagggattcgatatctcgcagcacttcccgcgcctgctctagctgaccagtaggcaaacgcgctttacgcaccaggaaattcagggcgcgctgagtatccatcagacacaaacgcaccttccagccgatatcttcctgctccgccaacgtggacagcgcggcatcgtactcatctccctgatgcccttccataatcacgcggctaagcgcttccagatcgctgtaaatattctctatttcgtcagccaactgctcgattttggtttcaaacaagtccagcagcagctcataggcgttaccgtcgaccaacgtctggttgcgggcgcgcatccgatacaggcggaaagcgggtaactcgcgctcacgcagggtatacaggcggccatcccgaatggtaaatgcgacggtggagttaccagcgtgatcttcggcgtcttcaaaatagaagaatgagtgaatgtgcaaaccgtcttcgtcttcaaagaaacgagcggaagcctcgatatcatccagttctggccgggtcgccaaactctgccctaactcacattgaacacgctcacgctcaccttcttctggctccaccagatccacccacagcgaggtagtcagatcttcggattcatccagctccagacgggataagcgattgttctctaatttaaatgcgctcagcatgtgccataactcccttggggaatggatagagattacgcattgaagcacagaaacaaggggatgtcgttacatcagcaagtttcagaccataaggagatctgactcacagcgacggtcaaacgaggtcgctgacaaccacgaaggctatcagcaaaagaggatagccttagaagttgcaccatatgaacaggttattgagccagcatctactgggtgtgtccaaggcgaatgtcctcattaagaatagtgcgcgcatgttacgctgagaagaaaaaggctgtcaaccgctacgccgcagttagtcgcagcctgagattcatcctatttcctggcaaatattgttgtcagcgtaaacagatgataaacggcagacttaggctaatcactctggcttatatctgccttccgcttcggctacattgggcgctacgcctcaactggaataacggtaaatgaaacaaatcactcgacctatgctggcacaaatgagcgaacaggctagacaactcagccgtttgcgcactcatcataattttcacccggaactgagcgattccgtccagcgtctggcaatagccatggagccactaacctacgtgcgcccacatcgtcatccacatacctgggaagtactaactgccctttccggacattttgtggtgctgttattcaacgataatggcgaagtgacagagcgggtagtactgggaaaagaagcgaccattctggagattcctgccaatacttggcacgcggtgctgtcgatggaagaaaatgcagtgatttttgaggtgaaactcggcccctatcagccagtcaacgcggaagatttcgcgccttggtcaccggcagagagtgaaccagaagtcgccaatatgctggcatggtatcaaacgactacggtcggcgagcgttattccgcttaactatttgatttaaaaatgatgaaaaaaaccggagttatcattagctccggtttttttatgctgcaacggcgaatgatggcttataccgcttccagtctcgcataggctgcaaccagccatttaatcccttcgcctggaaaagcaatttgcaggcggctgtgctcgccgctgccttccagattcaccaccgtaccttcaccgaatttaggatgacgaactcgctgacccagagtgaaaccgctgtcgttttcattcattggcgtccccatacggcgatgatttaccggacgagaaacgctggcgcgtagtctgacttcttcgatacactcctgcggcagctcaccgataaagcgggatgggcgatgattgacttctttaccgtacagtctgcggctttccgcatagcataaggtcagtttttgcatcgcacgggttaagcctacgtaggccagccgccgctcttcttctaagcgtccaccttcatccagcgacatttggctcgggaacatgccctcttccatacctactatgaatacctgcgggaattccaaccctttagctgaatgtagcgtcattaactgtaccgcatcctgataggcgtccgcctgcccttccccagcttccagcgcggcgtgggacaagaacgcctgcaacggcatcagatcttcatcctcgtcctgataactgtactgacgcgtggcgttgaccagttcctcaaggttttcgatacgagcctgacctttttcgcctttttcctgctcatacagggtccacaggccggaatcgcgaatcacgcggtcggtttgcacgtgcagcggcatatctgctgtttcgtgagccagtgaatccaccagttccacaaaacgctgtaaagcagaggcagcgcgccccgccagcactttttcctgcaataacgctcgagtagattgccacagcgtaagctggcgatcccgcgcagtctggcgcactacatctagagtacgatcgccgataccacgggttggcgtattgaccactcgctcaaaggccgcgtcatcgttacgattggaaattaagcgcagataagccaatgagtctttgatttcctgacgttcgaagaagcgctgaccaccataaatgcggtacggcatcgccgtttgcagtaaagcctcttccaatacgcgagattgggcgttgctacggtacaaaatagcgcagtcgtttaacgcaccgccgttgtcttgccaggctttaatccggttcaccacaaagcgcgcttcgtctaattcgttgaaagcgcaatagatcgaaatcggatcgccttccacgccgtcggtccacaggtttttccccattcggccatcattgttggcaatcagggtattcgccgctttcagaatattactggtagaacggtaattctgctccagacggatggtttccgcgccggggaaatccttcaggaagcgttgaatattctcaacctgcgcaccacgccagccgtaaatcgattgatcgtcatcgccgacgatcattacgttggaacgatcgcccgccagcaggcgaatccatgcatattggatgctgttggtgtcctgaaactcatccaccagaatattggtaaaacgttcacgataatgattcagaatatgcggtttattcagccacagttcatgagcacgcagtaataactcggcaaaatcgaccagaccggcgcgatcacaggcttcctgataggcctgataaatacgcagccaggtggcttctaccggattaccgtagctttctacgtgctgcggccgtaaaccttcgtctttcttaccgttgatgtaccacattgcctgacgcggcggccactgtttttcgtctaaattcaatgccttaacgatgcgtttcagtagccgatgctgatcgtcgctgtcgaggatctgaaagtcctgcggcagattggcgtccaaatggtgtgcccgcaataaacggtgcgccaacccgtggaaagtcccaatccacataccgccctggctggtaccaatcaaatgttcgatacggtgacgcatctccgccgccgctttattggtaaaggtcacggcaataatggaatagggtgaagcattctcaacggagagcagccaggcaattcgatgcaccagcacccgggttttaccactgcccgcaccggccagtaccaacaggttgcagcgcggcgcggccacggcttcacgttgtttttcattcaggctgtcgagcagatcagaaacgtccataggcaccgtttatcgggtaagggaaaaccgcgctgtcgcccggtttgaccggacgaccatcagcattccactgggaatttatacagagtaattgataggattataacaatgctgtgagagatgccaactgcgaaatctcaatatgtggcagtaaacgggcatcattgaccgccatgatatttttctgccgatcgttaatccagcaggcctgcatgccgcaacgcagggaaccagcgacgtcggtggtgagatcgtcacccacgtgcaaaatgctttccagcggcaaatccagcttattggccgccttttggtacatatcacgataaggtttggcacggccattggggccagagcgcagcacaaactggaaatagcggcttaaaccgcaggcggcaggatcggcgttaccgtttgtgatagccaccagcgggaagcgttctgacaaggtctccagcgtatcgtgagtcgccgcaggcacatgaatacggctacgccacagggcgaaattctccatcgccgcgtcagcacctttacgggcttcatctttggtcaggccgtggcgaataagacctaactccaacgcctgccaacgccactgggtaacatcgtgataaatatccggatcgctggccagcagttcaatgcgaaaacgatgaaaatccgccacctcaagctggcgtaaattcggatgatactgttgcagaaacgccaccgattcctgttcggtacgggaaatcaccgggcggttgtcgtacagagtatcgtccaaatcgaaggttatagccgcaatcggctgtaatggtcggtaaaaatgcatcaggatttgcctcgtttggctcgcggatgggcggcatcatacaccgttgccaaatgttgaaagtcgagatgggtataaatttgtgtggtcgttagattggcgtggccgagtaattcctgcaccgcacgcagatcgccgctggattccagcatatgagtggcgaaagagtggcgcagtttatggggatgaatatggctgctaacgccttgttttataccccattcggcaaagcgtttttgcacattgcgcgcagaaatacgcttaccggtattggcgaggaaaatggcgtcatcggcgggttcaaacaactcccgtagcgctagccaatgctgtaaccaagtcaccgccgtagcgcccatcggtactttacgttctttgctgcccttgcccatcacccagatttcgccactggccaaatccacatgtttgcaatccattcccaccagttcggctaaacgtaaacccgcgccgtacatgacttccagcatcgcccgatcccgcaccgccaaaggatcgttaagatcgatgtccaacagtcgactgacttcatccacatcaatattttttggcagatggcgccccgtcctcggcgtactgacgcctttggccggattggcgtgtaacacgccctggctgaccaaccaatcgagaaaactgcgtaatgccgacaggcgcagcgccaggctagaagactgtaatccagcacgcttgctgcgggaaaccagcgaacgtacctgcgccgcatccaaactctcccactggctcagccccatttgacccgccagttccatcaccgcctgtagctgtcgagaataactggttatggttaagggactcagttgccgttcaaccttcagataacgcaaaaaggcttcaacggacggagagagcgtagcggggatttcactcatactcgttcgatccagcgctccaacaaggtaggcaacatcagcgctaactgatgcagcatcaccgtacccataccctgctgataatgttgtgtatcacggctactaaagataaccacgcccaaatcgccattcgcgcccatcagggacatcgcaaccgagccgacctgtttagcctgaggcaacagcaacaaaagctctggcccatttaggctgccgaggtaatgacgctcatcccccaaacgctgaatgcgcatcggttcaaaagcgtggcgtgctaaacccagatgagtgaaatcggaaggcgcgccaatatgccagcggtcgttaaacaggcgcacattggctcctgccaatccaaaatcccgcgcccagcgctgtaggcgattcagcatatcttgcaggctttcggcggaggtcagattagtttgtaactgtaacagacggttaaacagcagctcattcagaccggcctgctccatcaacagggtaatttcttcttccagttgatgaatctgattacgttgacgagccagttgccactcgaccagagacacgctgcctctgaccggatggggaatttgcatctgttcaaccaaacgggcattacggataaagaagtcgggattttgcaataaatactgcatgacagcgtcgtcgtctaactcaatgccagccagcgcctgttcctcataattcttcattcttcaacacccatcataaatgaataaaaccgtcgtagacgtgggtcgcaggcccggtcatatacaacgggtgacccggtcctttccagctgatatccaggctgccacccggtagctcgacgtgaacctcttcactcagcaatgcctgctgaataccgactgccacagccgcacaggctccgctgccgcaggcttgtgtttctcctgcgccgcgttcgtagacccgtaaacgaatgtgttcccgactgacaacctgcataaagccaatgttggcgcgctcaggaaaacgctcatgattttccaatactggacccagcaactcaacgttggcaaccgaaacatcgtccacttgcagtacacaatggggatttcccatcgaaaccaccccgcacagcaccgtgtgctctgccgcgcgcaaaatgtaggttttttcagcttttatcgctttaaacggaatcgcctgcggctcaaaattaggttcacccatattgacgcacaccagctcatcctccgtcacgctaagcaccatacgcccagtttgcgtactgacacgaatatcacgcttgttggtcagccccttaatccgcacgaaacgagcgaaacagcgggcaccgttaccacattgagagacttcgctgccatccgcattaaaaatgcgatagtggaaatccagctcaggatcgtaaggcggttcaaccaccagcatctgatcaaagcccacgccagtgtgccggtcagccagtcgtcggataagctccggcgaaaaataaacattctgtgtgacggcatcgacaaccataaagtcgttgccaagaccgtgcattttggagaactgcatatcatgctccactgactactggctaaatccggacgcgataaagcgatttatcgcagtaagcatctggcctccaacagcaggaggccaacgtcaaactgcggggagaatctgggttactgtaagccgccgatagactgagtctgctgcgagccaacattatcttcttggtttttctgcactttgcctgaatctggcggtacagtttctgtctttgaattttccgcaggagggaaataaagtggcccttttaagccacatccggatagccccaccaacatcatggcgaccagcggccagcgtagttctcttttcattgcattaatgcctgtaattcatgcgtccaaggtctctataatcgcaggtggatcatgaaaagcaataggaattgaatatgaacgacagcgagttccaccagttagccgatcaattgatgtcaaacattgaaaatgcagtggataattttgatggcgacagcgatatagactgtgaaactaacgggggcgttttgaccctgactttcgagaacggcagcaaaattgtgattaaccgccaggaaccctttcatcaggtttggctggcaaccaaaaccggtggttaccattttaactatcgggaaaatgaatggcactgcgaccgcagcgggaaaactttctatacgctgctttctgaagccgccacggctcaagccggtgaagaggttagcttcgactaacctttattccagcgccggccagtaagaatcggtaaaaggacacaaaacagcgtgtcctgatttccggtttaccaatgacgtttaacgataactagtgcagctgaaactgttgcggcggcgtggaagactctttttccgtcgcgttatgacacagatgagaaagcgtagtgctgcggaacggaatcacctgagtgcgcccgtctaactgcacaatctgatagaactgcggcaggttaaagttaataaagctggagccataggtgaaacgatcgtgagacgatgagtagaagcggctgacatcgcgcaccaactcttctttactgccttcgcaatgatggtaaacctcaactctattgctctcgtcgagaatgtagatattgaagcctttcccatcgctagtgccttcaaagaagaactgaataattccttcactagcgaatccgtcgacaaccggcggtaaatgaatctgatcggtttctacctgaatcgacaggccatgcagcttgttattggaaatggcaccgtagaattccaccgcattttccagtttctgcaccgatacactaagacgctcgaagaacagcccccaggtctgcccggcgactcgaaccgctttaaagcgacccggttcttgacgagtgctggaaaggcgcagctcgatgcattcggataccaattgttgaatgcgggtgcgaatcagcccgcgtaaatgctggctgtagcagaatacatcaacggattccggcggcgcggcgtcctgatgcattttgcctaaaatggttttcaatgcctccaataccgcctgttcgccgctgaaatgcagggttcgcacttcgttccacgagttgcgatacagtaaatcgatactgcccaccagacactgctgttgctcaccgaaactgaatacgtccagttttcggaaatcaaaatgcacaatctggttgcggaaagcggccgtcggatcgttttccagattgacgatgatcgccagatggcggatttcgcacgggctgtacagcgctttcggcgtcggcgcaggcaaacgcaatgggaaatggtgagaaacatccgtcaccagttcttgcaattttaccgtatcgcacaaattggcgcttttaatatgtaaatgcgtttttgacgtcagtaagccgttgaaataagcccaagccaccagtttgttcagatagcggttatattccagcggctgatggctcactatggcatccatagacggagcctgattatacaaataccaaccgggccggttagcgcgtcctgccggtacgtgaataaaggtcaaatgttcttcggacagatccggcgagatttgtgggttaactaaagtaactttacccggtagcgcctcaaaggccgcatagagtttacgggtcaataccccgatatcctgcggactggcactaacgctcagattattacgacgcgcgaaacggatcagattgcgataactctgcatcatcgcatccaacagctcgttatgcgcttcacgcacccgctcaattttccagttggcgcgattgtccagcatttccagacgctcttcgctccagccccactcactaaccagttggctcagtatctcccgacgccaaccgctgctggccggcgttttagacagtttttcgcaaactttcagatagaaacagcggcggactaaatccagacgagtagtatcttcgatttgcgtcagataacgcgtgacgcgatccagcatcatgcagtagccatccagaccgaatgacacaatctcgcctttatgcagacgctgcttgatttccatcgccagcagctgagaattcgggtattcccacgaatacgcttccaacagcagcgttttcaagacggctttgtagggtgaatcaatactcttatagagctgccacaggctggctccgaaatactcttcagccgatagggtactcaagccaccgagatccagccattcatttggcgtcagcgcaccttgggcatataaagaaagcacgtaatcgtcgtaatggccttcttcttctatcggcaccatattccacagaatacgtttccccgccaggcgcactgcgctgcggtagaactcgtctaataacagaatatgttgcgtagaaccgcagtcttcaccgcccaaactgccgctggcattgtggcggaaacggttttcgtcgatcaggaaaaagctgacttcgacgcccatagaggccgcccatttctccaattggctgcatttttgttgtagctgattgcgttcttcgttatccagccaggcttggtggcacacccaaatgtccagatccgaagtgctgctttgcccaatagaagaggtactgcccatggtgtaaacgccggtgatcggcagttcgccttcccgcgctaattgcagcggttcaccccatttgctttcaacttcagtaatatactgttgttgggtttccgtaggcgtgaagaaacagacgccgtggggaacgttaccatcaaggtaacctggcatcagtgggtgatgataatgtaataaggttggcagcagactgtagaccttttggaaggctggccccatggccgccaaggcgcgatcgactcgtaattggttgatcgcatccagtcgctgtttcagtgtctcgatgtagaggtacaagacgtctcgcctgattgttccagtgcctagaaaaaaacccgtgttcccgattcgcctttagtttagaagaatatttaacgaattattgctggaaacgtgatcaatctaacaccttgccgattgaccgtaaagaaagtaaagctatatgcgccattctaatacttacccagccaccctatccagccgtccatttgttaccatagcgtctttcttgcacggttatccgcctgaatcctgtggcttctacactgacagttttcccttctcggtgttaggatggttagctaaatataaaaacggtaatgagcatgttagacaaaattattcgaattgccacgcgacaaagcccattggcattgtggcaagcacattatgtacagcagctgctgcaagcctgtcatccggggctacaggtggagctggttccgatggtgacccgcggagacattatccttgatacgcctttggccaaagtgggtggcaaaggcctgtttgtaaaagagctggagctggcgttgctggaaggccgagccgatgtcgccgtgcattctatgaaagacgtgccgatcgccttccccgaaggattggggctggtcactatttgtgaacgtgacgatccgcgagatgcttttgtttcgaataattaccagcatatggatgaattaccggcgggcagcgtggtgggtacttctagcctgcgccgtcagtgtcagctacgccaacgccgcccggatctgatcgtcaaagatttgcgcggcaacgtaggcactcgtttgtcgaaactggatcagggcgactacgatgccattattctggccgtcgccggtttaaaccgccttggtttgaaagaacgtatccgctacgccatgagtccggaagaatccttgccagcagtcggccagggcgctgtcggtatcgaatgccgtctggatgatactctcacccgcgaactgcttgcgccactcaatcaccgccagactgagctgcgcgtgtgcgccgaacgcgccatgaatacccgccttgaaggcggctgtcaggtgccaattggtagctacgcggtgctagaagatgacactctgtggctgcgcgcgttggtcggcgcgccggacggtagccaaatgatctgcggtgaacgccgcggcccatctgccaatgcagaacaaatgggcatcgagctggccgatgagctgctctctcgcggtgccaaagaaattctggcgctggtttatcaggataatccgccactatgactattctggtcactcgcccttctcctgccggtgaacagttagtcagccgcctacgagcactaggtcgggttgcctatcatgcgcctttaatcgatttctctccgggccgagatttacctcgtctaccggaaatgttggcagaaatgcaggcaggcgatctggtttttgcgctgtcgcagaacgccattcgctatgccaacccgctgttaaacagaaataaactgttctggcctgccgagctatcttattatgctataggtcgctcgacggcattggcgctgcacacggtgagtcgcctaccggtcacttttccgccgatgggtgaaaccagcgaaatgctgctcttactgcctgacttgcaggaattacagggtaaaaaagccctgttgctgcgtggtaacggtggtcgggagctattaggtgaaagcctcgcagcacgcggcgccgaggtcacattttgcgaatgttatcaacgtagcccgatctattacgatggcagtgagcaaagcgcccactggcagcgagccggcgttgatatcctggtggtaaccagcggcgaaatgttacagcagatctatactttaattcctgattactatcgttcttcctggctgctgcgctgccgcctgatagtggtgagcgatcgtttggccgcccttgccagtcaactaggctggaatgacattcgagtggctgagaatgccgataatgacgcgctgatccgcgcgctacaataaacctgactatgggatgcccaatatgacggaacacactaccccatccgccccagtggaagagacaaccacagcggttgagcggccccaacagccagaggctgaaacaccaaaagacaagcgtagcgggcccattctcggcgctgttgctatcgccattgcaattattctgagtgccggcctttattatcagggccatcaacagaaacaacagttggtcgccgccaatcaagcgttacaagaccaactggctgcgttaaaaaccagccaaacgcaggaaaaacagcggcttgaagctttgttacagcaacaaggtaaagcgctagacaccgctgaccgccagcaagcgtctttggctcgccaactcaatgaactgcaagggaaagtcgccaccatttccggcagtgatgctaaagcctggctgctggctcaggctgattttctggtgaaaatggcaggacgtaaactgtggagcgatcaggatgtcctcagcgccgcaaccttattaaaaagcgccgatgcgagtctggcggatatgaatgatccgagcctgattgaggtacgccgcgccattaccgaagatatcagcgcactgtctgccctaagccaaatcgattttgacgggatcattctcaagctaaatcagctttctaatcaggtcgataatctgcgcatggcggataacgtgactgatgatgcgccgatggatgaagacagcaccgaactgtccagctccctttccgattggaaacagaatttatccaaaagctggcacagtttcctctccgatttcgtgactattcgccgccgcgatagcagcgccgagccgctgttagcaccgaatcaggatatttatctacgggaaaatattcgttctcgcctgttggtagccgctcaggcggttccgcgccatcaggacgaagtgtacaaacagtcgctggaaaccatttcaacatgggttcgggcttatttcgacgttaacgacccgagcaccaaggctttcctcgatgaactggaaagcctgagccaacaatcgatctcaatggacgtgccggatcagctaaaaagccagccgctactggaaaagttgatgcaaactcgtgtccgtaacctgctggcgcaaacgcctgtggtcaatcaggagggataagtatgattcgagtcttactgctatttctgctgctgatcgccgggatcattcttggcccgatgctcgccggtcatcaaggctatgtattgattcaaactgatgattacaatattgaaaccagcatcactaaattgaccattatgctggttggattgattttcgtgctgtatctcatcgaatctgtattacgtcgaatgttccgcaccggggctcgcaccagaggctggtttatcggtcgcaaacgcagccgcgctcgcaagcaaaccaaagccgcgctgatcaaactggccgaaggcgattttaagcaggttgaacatttgcttacccgcaacgccgagcacgccgaacagccaatggttaactatttgctggcagccgaggcggctcagcaatgcggcgacgagttccgaaccaatcaatatctggagcgagctgccgaagtggcagataccgaccaattaccggtagatatcactcgggtacgtattcaactggctcaggggcagatccacgccgctcgccacggggttgatcgcctgctggaactggcgccgcgtcacccggaagtattaaggctggcggagcaggcttatctacgcaccggggctttcagctcattgctggaaattttaccggcgatgcagaaaatacagttgcataccgcggctgaaatcagcgcgctggaacagcaagcttatattggcatcatgaatcagtgcatggccgaagaaggcagcgatggattgaagcgctggtggcacgatcaaaaccgcaaaatccgccataatgtggcgctgcaggtagctctagctgaacacctgattgagtgtaacgatcacgaagtggcgcaacaggtgattctagatgggctaaaacgtcaatatgacgaaagactgatcttactgatcccgcgccttaaatcaggtaatcccgatcctttggaaaaagcattacgtcagcaaatcaagcagcacggcgcgacgccattgctaaatagtacgctggggcaattgatgctgaagcacggcgagtgggaacaggctagcgaagccttccgcgctgcgctgcaacagcgtcccgacggctacgattacgcctggctggccgatgcttatgacaaactgcaccgtccagaagatgcggctcaggtacgtcgtgaagggttaatgctaacgctgaaacaaaacggcgagtaaaatcttttactgtgattgagacaggctcctgcgggagcctttcttttatctgccgaaccgcaaactttcctaccggcaaaaaaaaacacttgccgattaagcaagtgtcataaaatatcaggtctacagtcaacagattggtgcctcactcaacgttacgcccggtatgtgatgaaggaggggattggttaccgctcaacatcgtttacgtggacaataggcaccctaaaattggctctgcatcatccctgggtttatgaagactaagctgtcataagaagtgggatgagcatctacaagatagatattgcacttcccgtgccaacttatttaatctcttgaacgttactgtaaataaagccaaaaaagtgacttaacattatgaaataaatcaatttttaatatttttagaccaagaccgatttattcctcttcaggctctgagtttcatcacgtttggatttgatctgtcgctacaaaacgacgtaaaaaccgattcctatttttattcatatttatcattatgttatatgtctccattgagagacattaccgatatctagtgtcgcaaaaacccaacaccgataaatcgcaatagctttggctttggctttggctttggctttggctttggctttggctttggctttggctttggctttggctttggctttggctttggctttggctttggctttggctttggctttggctttggcaggggaactgaatccatttagctgagaaaacgctacctgatgaatcctttaattgaagtattgctctttgaatgatgcacaagagaattaaagcagcggaatattgataaagcagaatgccagcggcatcctcttctcagcgataagcagaaagggttaacgctgagagacaaattcaagacgaaaaaaaaccccgcattgcggggttttcttcggaatgtggtcggcgagagaggattcgaacctccgacccactggtcccaaaccagttgcgctaccaagctgcgctactcgccgatttcttactgcctactctacatagtctttcgacttatgtctatgtaaatattaataaaatctacatagtttgtgtggtgcgaagggagggacttgaaccctcacgtccgtaaggacactaacacctgaagctagcgcgtctaccaattccgccaccatcgcatgttccacaaaaatttggggtggctaatgggactcgaacccacgacaactggaatcacaatccagggctctaccaactgagctatagccaccataacttctttactgctcacaaccgtcgtacgcggcaatattaccaccgcagctcttgcacacaaaattaatggtgcgcccgacaggattcgaacctgagacctctgcctccggagggcagcgctctatccagctgagctacgggcgcttagcgccgttgcgggtgaggatactacggttttaatgcctaactgtctagtgcttttttagaagaaatagtgcgtttgattacgctttgctctctctgccgcaaaagacagctatttagtcccctcaccctacctttatcgctggttttatagacgtttcgtcatcacacgcgtttcttatgcatccctaaggcgaaatagcacagtgacactaacgccaggaaaatcgctcccactaataaagataagcgcgtatccggattaatccccataccaaccagcacacaaatcaggaaggcgatggtcagatagttcacataggggaacataatggatttaaacggatgttgcttaatcgcttctttatgtacctgacggaaacgcagctggctaatcagcaccacaaaccacggtaccatacctggcaacacgctggcgctgtagacatacacaaacacctgctgaggattaggaatgatgtagttgaggctggaaccgatcagcaaacacagaatagtgactgcgatacagtaaaccggcacgccgctggcagagactttcgtcaaaatagcgggcaactggcgattcatcgccaaggcatacaacatacgcccgccgctgtacataccgctgttacagccggacagcgcagcggtcagcaccacaaagttgataatcccagccgctgcggtaataccaatcttggcaaatgtcagtacgaacgggctaccggtagaaccaatttcattccacgggaagatagtgacgatcacgaaaatcgcaccgacgtagaaaatcagaatccgccacagaatattgttaatcgcgcgttttaaggtgacttgggggtttttcgcttcaccggcggtgataccaaccagttccacaccctgataggacgctacgacaatacacagtgcaaacaggaaacctttccaaccaccagcaaagaagccaccgtgctgcgtcaggttatcgaaaccaatcgcctggccctgattgccgaaaccaaagaagatcacgccgataccaaccactatcatcacaataatagtggtgactttgatcatcgcgaaccaaaattccatttcaccgtacagccgcaccgctgcgagattcgccaacgcgacaatgactacgccggcgatcgccggtatccactgtggcaattcggggaaccagaagctgacgtataggccaatggcggttatctccgatatacccacggctatccacataaaccaatagccccaggccgtcagatagccaaaatacgggctgagatacttatgggcgtaaaccgcaaaagaaccggccaccggctccagatagagcatttcgcccatggcacgcataatgaaaaatacgaacaacccggcaatgatgtatgccagtaacactgatggccctgcccatttcagcgtactggctgcgcccataaataacccgacgccaatggtgccacctagcgctatcagttcgatatgccgggcttccagcccacggtgtaatccttttttatcttcgttgtctgccataaatcctctgtagacttaattttgttgtgttcaatcccccggataaccccggttgttataattatcaggaaaagagaaaagcgactgagttcacgccgaacacctgcgaaaggaagcgctaaaactgctggtctgctgcaatcaggttagaaaaatgcatgccgagctaacttaaaaaaactgtcgtactcgtcacggaaattaaccggccaatatcgttccgtatctgaatcatataagcaaacaacaaattaaaaccttatggaatataaaaatgaatttttattccttaaagggatattgctgggatgtatttttgcgaggaatagctcaggaggaaatactggcagggctggattcaccaaccctgcgacagacgcagttaaagacgtccggtatagtaataacctacaaatttaagcaatttaagctgacgacgaatacggctcggctgcgacagcaggcgatacagccattctaaccctagattctgccaaaccttaggcgctcgctttacatggccagtaaacacgtcataagtaccacctacgcccatatacagcgcattagggtgaacctgacggcaatcgcgcataaagatttcctgctttggcgaacccatagccaccgtcacaatcgctgcgccgctggcagcaatgcgggtgaacaaggcgtcccgctgttctggagtaaagtagccgtcctgtgagccgacgatattcacattccactgcgcccgcagtttttcttctgtttctgccaggatttccggcttaccaccgaccagaaacaccggtgtcccctgctgaccagcacgctgcatcaaggcttcccacaggtctgcccctgcaacgcgcgacacttcagcaccggcatacttacggcgaatcgcacgtaccatgctgatgccgtcggcgtagagatactccgcatcgttcaactgggttcgcaatgcggcgtcatcttccgccttcagcagcttttccgcgttcatcgccaccaaagtaccggtttttacttgttcatttcccagcagataatccagcacctgggccatatcgcggaacccccagatattgaagccacgcaggttgtacttaggaattgctgttttttgttccatttctacacttaaaccttacagttgactcgtcgtgtcggcagaagaagcattgttcgccccagtatagctgcgacgaatacgttgcgttattagtccgctgacgtcgaataaccaatacagcagtttcgctaccaccagacaggcgccgaaaataatgcaaaagaagaccactcgagaaacaaacgaatccagcccttcacgcgccaatacgatcatattaaatacggctccgaagcagaagctttgcagaatcgccgccttgtagcggttagtttccgctttaccttgctcgtatagccagtcaaaccacttaataatcagcccgacaataatcgcaccgatagggataaacagcgcgccgcccataaccaccagagaaccaatcagcgtaggggaaatcgccagcccggaatggttatccaatacgtcccaggtgaagtagttcgcggtattcagcaccaaatcaggacgccccggccagagccagcttgggataaacacgtagaaatctcgaactattggtgccagtccctggaaatctatcttgtcgtaattttgcagcaacagccccagattttcccacggcgagaaggtgtctcgcgttaggtacaggaaggtatagaacgcctccgcgccgctgacatccaggctatagcgtttcagcgccagccagaacataccgacaataccgaatacgccagctgccaccagcatccacagcgtaatccaaccgcgcacaatgccgataaacaggaacaatgcaaaagcgataatgatattggcgcgggttccccccacgataacataggtcagaatgccgaaggctacggtgctggcgaggaaaaagaaccatgcccgcatatcctgtttaaggaaatacaccaccaacatcgccggaatgaagaagtagaagaaacgcttcagagccacgccggaaacatcactggagaatatctggctataagaattcagcttaaataacaggaagccgttctgtaggaagaaaatacctacggtgccaatcgccaccagcgccaataagatccaggtcaggttggtttcaacccgattcatcgtaaatatcggccgccgtggctgagttcgtggcttccgcagacgcgttttataggtgacatagtaaatggcgtaaaacgccgtggcggacagtatggcgtacagcaaatagtccgccggaactactgcgacatcaaactgaaataccaacatgcaggtcagcggaaaaccgaagtaaaacgtcagtaaatacagcatggaaaagaagacgttaaagttgaagcgaacccgcctgaactcctgataggtcaacgtgaggataaaaatcactgcgatcaaatagacgctcagcaagccgccaaattgccccaacgtcatgggttttctcccgccgccagcgctaatgcctgctgccaaccatcgatataattagggttaaagaaagcgatggattgcttatccagaccggccaattgccgttgtgcttcacgtatcaaagcttcatccagcgtatcaccgtagaacaacactggaatatgttgctcagccaaatcctgccagaacggattcagacggctaaggacaaaaggcacgccaaattgggttaacagacacaaagtgccgattccctgctgacgattaaaaataaaatagcctaaatcgcattcgcgcagaatattcagatagtcatcgaaggcaatttgttcggtcagaatacgtagattttctgccggaaataacttcagcccagcggttcgcacctgatcgatataagcatcattgttcgcgggatagcccatcggcaaaatcacccgaacatcggcgccaaactgctgacgaatggatttcagcgcttcaatatgtcggttagtggtatcaccggaattaccgaccaaaatcgtcattggcccgactaaaggcttctcagcctgaacgccggtcagcgtcgggtccatacgcgttgggaaataaagcaaagacgctggcactcgcggatgacgctgctgatagtgaatcaaatccccgcgagtagcaaaaacgtgcccgacacgcccttgagccaagcggcgcagcaggtaaaacaggcggaatttccagctttttgcatcttcatacagatcggcaccccaaacgtgccagaaaacctgatatggcttaattttgccgcttaataaagccaaccacagcgtggcattaaactgtccatgccaaaagaaacgggtattacgatcggcctgcgcgcgcccaataaccgcctcagccaacgctttcttattgggcagagtttcaatctctaaagcatcaaaaacagcaaaggaggcactgtctttcgccgcgaccataaaatgccgcacctgttcggcgggcaggcgcgcggccagcacatcgttaaagaagcgcagcaccgtctggttatgatgcgggatgtcagatcccaatacgtgaatcagggttttcatgtttttctaggtaacgaagatctacggtaaatgacgaatacgcagctacacagggcaaaataaacgatataagttgccatataagcctgggctgcgccaagagaaccatgtaacggaatcagccaatgggcaaaaccggtcaacaacaggaactggctaacttccgctagaatataaaatcgcagggaggcttttgcgataaccaaatagccgaagacataagaccctacttttagcacgtcacccaccaactgccaggcaaataaatcgcgcatcgcggtaaactgcttagagaataacagccaaatcgcaaaatcacgcagtaaccacaccatcatgctggctgcggcaaccaccggcagtacaaacttcagcgagcgtaaaatctcgcgggaaatatccgctttatcctttaaacgcgacagcgtcggcaacaaataaacggtaaaagaggcggtaataaactgcaggtaggcatctgaaatactgcttaccccttgccaaataccaacttcatcccagccatactgttttgccagaagattacgcatcatcacgtaagcgacaggaagcgttactgaggtaatcagcgccattatggtgaacttacccaaatggctggccagcgccttatcccaacttagtttaaggtagctgaagggaatagtcttgcgacgcaccagaataaaagtcgctggcacgacgaccaacgcaggaaccaatgctaaacccactaacgcgccaaaatagccgcctaatcggaagcaaagataataagccactacgccaatcagactaccgccgataatcgccagcgcgttgcccatcgcatcgcgataacctttaagaatagccagaaacaggttcgcgtaggcgatacccatttgaataaaggcgacggcacgcaccacgttctcataatcagcacggccaaatagcgccacgctcaccggttttgccgcaaataaaaacagcaaagccaataaggtagagaaacccaacactatcgccgacgaggtgcctaataccgcacgtagccgctccggttgctgatgatattctgcgacatatttggtaacgccgttaaaaataccggctcctgataatacgcctaataccgtaattaactggcggaagttacccgcctgtcctacgccgctggggccaaaagtgaccgccagcagtttaactaccagcaaacctacgccgatcttaatcagcgtagagcctgcggtccaaatagatgcttttgccaatgacatatcaggcgaagaaactcagtacgcggttaataatgattttctggttggcctcggtcagcatatagaagatcggtagacgcaccagacgctcactctctttggtggtaaagcaatcctcaccggataaacggccaaattcggcacccgccgggcaggcatgcaacggaatataatggaagaccgtcaaaatatcggcttctttcatatagctgataaaggccgaacgctcttcaatatcacgaagtttgatataaaacatatgagcattctgttcaacatcagcagggactattggtaaatcgatacggcctgcgtcagcaagaggcttgaatgcagcgtagtaattttgccacagagacagtcgacgttgattaatctgttcagcagcttccaactgcccccatagataggcagcctgtaaatcagccatcagatagctagaaccgatatcacgccaggtatatttatccacctgaccgcggaagaactggctgcggttggtgcctttttcacggatgatttcggcgcgatcgatcagagatggatcattaatcagcgttgcgccgccttctccacccgccgtgtagtttttggtttcatggaagctaaagcaaccaatatggccaatagtacccagcgctttgcctttgtaagtcgacatcacgccctgagcggcatcttcaaccacaaacagatcgtatttttttgccagcgccatgatggtatccatctcgcaggcaacgccagcatagtgaacgggcacaatcactttagttttatcggtaatcgccgcttcaattttggtttcatcgatattcatggtgtcgggacgaatatcgacaaataccattgttgcaccgcgcaatacaaaggcattagcggtggaaacaaaggtaaaactcggcatgatcacttcatcgccgggcttaatgttcagcaacaaagccgccatttccaacgatgcggtgcaagaaggggtcagcaagactttcgggcagttaaaacgctgctccatccactgctggcaacgatgggtaaaaccgccatctccgcaaagcttcccgctgttaattgcatcttgcatataacccagttcggagccaacaaccggtggtgtgttaaatggaatcatttcatcccctgcataaccaataagcggtgctctcaatagatgccccgctacgaatatagagacgcaaagctgcgatgttactcatctgagtggcgacatatagccgctgtaacccgtgatgctgacaccactgctttgccgccgacataagttttgtaccaataccttgccctgcggctcccggaaacgccgccagcaaaccaattcgagccgagccatcctgcaaattacgcaaagtgacaaacccgatagcctgattatggctatcgaccaccagcaaacattggtggtcgaaagttcccagtaccgctttttcggcccatagcgcgtagaaacgcccgctatcctgcgactcataccaaggcgcacggaaacgactaagagcaaaagcgcgggctgcggcgctgcgcaactgaggaatatccaattcagttgcgatccgaactgagcctgcagccagcatatcggaaaaggcggaactcgccgtcgttcccgaatggtcagcgacagaagcagtttccgtgccaattggcagtgaaagatcgatttcactttcaaccagacgaaaacccagcagattaagggcatcaacccaatccagacggtgcgcagggattttagcctgaaccaaagcataggcatccaattctgccgggttcagcaacggggcagaatcagataaattcagttttgcgctgtgtctctggaaaaattcactttcccagttcagcggttcaatattggcgcggacgagcatgcaataaatccagcagatatttaccgtaacccgtttttgcaagagcggtggcagcgcgttttacgccatcatcatccagccagccattacgccaggaaatttcttccagacaggcgattttaaagccctgacgcttctctaccgtttgtacgaaggtactggcttcaatcaggctatcgtgggtaccggtatctaaccaggcaaagccacgacctagtagctcaaccgttaactcaccgcgctccagatacatctggttgatggtggtaatttccagttcaccgcgggaagaaggtttaacctgcttggcaaaatcaaccacttgattatcgtagaaataaagcccggttactgcccaattggatttaggcacgcttggcttttcttcgatggaaagcgctcggaaattatcgtcgaactccaccacgccaaaacgctctgggtccatcacctgataaccgaaaacggtcgcgcctttctgtcgggcaacgacacttttcagtttagggctaaacccttgaccaaagtagatattatccccaagaaccagacagcaggattcaccgttaatgaactcttcgccgatcaagaaagcctgcgccaagccttctggcttcggctgctcggcataacttaggttaataccaaactcagaaccatcacccagcaaacgccggaaggaaggcaaatcttcaggagtggaaataatcagaatatcgcgaatgccggccagcattaagactgacaacggataataaatcatcggcttatcgtaaaccggaagcagctgtttagagacgccgcgagtaatagggtgtaaacgggtaccggaaccgcccgccagaactatgcctttcatagaaactcctgatttgacctgtaacaacgcgctgttcaaatgaagcagcgcgttagatggccgtacagtgacttttagacgtgctggcgaaatttaatcgctcagacccaaacgttcgccggcataagagccgtcctgtacgcgttgccaccaggatctgttgccaagataccaattgacggtcttacgaataccgctctcaaaggtttcctgcggacgccagcccagctctcgctcaatcttcccggcatcaatggcatagcgcatatcgtggcctgggcgatctttgacgtaagtgatcaaatcactgtagtgggcgattcccgcgggtttgttgggcaccagttcgtctagcaaagtgcaaatggtttctaccacttcgatatttttgcgctcgttgtgcccgccgatattgtaggtttcgcctactacgccctcggtcactacctgatatagcgcgcgcgcgtggtcttctacatataaccagtcgcgaacctgagcgccgttgccataaacaggcaaagacttaccggccagcgcgtttaaaatcaccagcggaatcagcttttcagggaaatggtatgggccatagttattggaacagttagtgaccaacgtcggcaggccataagtacgcaaccaggctctaaccaaatggtcgctggaagcttttgacgcagaatacgggctgcttggggcgtaaggcgtggtttcggtaaagagacagtccgtgccgtgcagatcgccatacacttcatcggtagagatatgatggaaacgaaatgcctgctttttctctgctgccagcgcctgccagtagtgccgagcagcttccaacagcgtgtaagtacccacaatattggtttctataaaagcggctgggccatcaatggatcgatccacgtggctttcagcggccagatgcatcactgcatctggctgatactgcgcaaagatacgatccagcgcggcgcggtcgcaaatatcaacctgctcaaacgcatagcgatcgctgtctgccacgacggtcagagattccctattccctgcataggtgagtttatcaaccaccacaacgctgtcggccgtgtcattgatgatatgtctcaccacggcggagccgataaaaccggcgccaccagtgaccagaatacgtctcaacgccatactcctttggtatcaacaatccactgttgcttcacttcttcaggtttaattgccttaaactggctgtgatcgaccagcatcaccagcacatctgcttgctgcagcgcttccgccgtgtttttcagcgtaacgttacctgctaatgatttcggcaattgctctacgttcggctcaaccaccaaggtttcacccgcatgccattctgcaatcaggtgtgcgatttctaccgccgggctttcacgtaggtcatcaatgtttggcttaaacgccagaccgaagcaggcaatttttacttctgatgcacgcttgtcgctgttcgccagacaatcagccaccgccgctttcacgcggtcgacaacccataaaggtttgccatcattgaccagacgtgcggtatggatcagacgcgcctgctgcggattttgcgaaacgataaaccatggatcgacggcgatacagtggccgccaacgcccggaccaggttgcagaatattgacgcgcggatggcggttcgccaaacgaatcagttcccacacgttaatgccctggtcggcacaaatcagcgacagttcgttagcaaaagcaatgttgacatcgcggaagctgttttcagtcagtttgcacatttcagcggtgcgggcattggtcaccacacattcgccttccaagaaaatcttgtacagctcactggcgcgggcagaacattttggcgtcataccgccaatcacccgatcattctgaatcagttcaaccatcacctggcccggcagtacgcgctctgggcaataggcgatattaatgtctgctgcttctccagcctgctgtgggaagctcaggtctgggcggaattcagccaaccactgagccatttgttctgtagcgccaaccggcgaagtcgactccagaatcaccagatcgcctttcttcagcaccggtgcaatagatttagccgcagactctacgtacaccatgtcgggttcgtgatcgcctttaaacggcgttggcacggcaatcaggaaagcatcggcagccaatggcttggtgaacgcctgcaaatagccgccttcaacggcaattttgacaactttatccaaatccggctcgacgatatgaatcgcaccgcgattaatggtctcgaccgcatgagcgttaacatcgacgccaatcacctttttcttgcgcgaggcaaaagcggctgcggtaggtaaaccgatatatccaagaccgataacagaaatagtttcaaaactcatagcgtcacctgatgattctttaatgcttctaggatgcgttgacaggcgtgcccgtcaccgtaaggattatgtgcccgactcatttggtgatatgcattttcatccaccagcaaatgggttacagcatctacaatttttttaacgtcggtgcccaccagcagaacggtgcctgaatctaccgcttctgggcgctcggtagtgtcacgcataaccagcaccggcttgcctagcgatggcgcttcttcctgaattccgcccgagtctgtcagaatcatataagcatggttcatcaggtagacaaatggcaggtaatcctgcggatcgatcagaatgatgttgtcgacaccgtgcaggatacggttaaccggctcgctgacgttgggattaaggtgaactgggtatacaacctgcacgtccgggtgattacgggcaatttcagccagtgcgctgcaaatgcgctcaaacccgccgccaaagctctcgcgacgatggcctgtcaccagaatcatttttttattggcatcgaggaaaggatagcgagcgtccagatccttacgcagtttctcgtctttcaacacccgatcgcgcacccaaaacagcgcgtcaatcacggtatttccagtcacaaaaatacgattatccggcagcaactcacgcaacaggttctgacgcgaattttccgttggcgcaaaatggtacatggccaaatggcctgtaagcttacggttggcttcttctggccacggagaataaaggtctccggtacgcaggcccgcttcaacgtggcctactggaattcgctgataaaacgcggccaagctggttgccaaagtcgtggtggtatcaccgtggactaaaatgacatccggtttaaattcggccagaacgggctttaaaccttccaaaatacggcaggttatttcagtcagtccctgtcccggcttcatgatattcaaatcataatcgggctcaatttcaaacaatcttaggacctgatccaacatctctcggtgttgagcagtgacgcagacttttgattcaaaggcttcatcctgagccaaggcatgcaccagaggagccattttgatggcttcaggacgggtgccaaaaacagtcaacactttcacagtgaatctcttttaggtcagttagccgcagacaacgcctgcaagttgggcgcttacgcgcccattagcaatttagtgctttacgccgggacgacgggccaatgccacgccagctccgactagtgcgccaatcgctccccacataatcatcaggaaagcgcgacgcgggctatcgcgagttaccggatcttccggagtacgcaggtaacggtaggtctggaatttctcttccagagtcggcccaacgtttaatgttgccagcatagcgcggttttgatcgtaatcgatatcaaagcttgggcctgatgctgccagagtttctaaacgcgcctgaagcataggtttgcccagcaggaacattttggaatccggcagttgctccgcaggcgtatccgtttggttacggctaataccctgtttttcggccactttcagcgcttgcttaaccgcattcagctcacgatcgtaaaccgcctgcgctacggcttcctgccgcttaacctgtgctttcattgactgagttcgcgcggcccatgccccttgaatttcatcatttaagtgactggcagcacgctggctagcaaaatcgacatactcacgtagcaatttgttcgagtcagtagcggtttccgcggtcagtttcacgctgtcgttcagcacttttttgtcatcgtgcggcgtgaattgaatattattgaccagctcatccagcaaagctgcatccgctttggcatccccttcctgacgttgcttgtagtaatcactcttcagccagaagtcacgacgggtatcgtaagccgctagttgaataatgaactcattataagcttcgtcagaaatactcggctgctcgctagccgaacctgaaactaaacgggaatccaggttacgcaaaaactgctgttgggaataatagccgcccagattattaactgttggcttatcggtaatcgcagtggcgctccactgctgcttcactaagtaggacacgcttagggcaatgacggcaaacagaaccgccataccgataatccaggctttaccacgccacagcgtgcagcaaaggccgcggatatctaactcgttatcgacagccagttcattgttagtagacgttttttctggtttcatcactgcccaaaagcctctgattaagatacatgcttattattagcccgccgcatccggcgcttaatacgcttgatgaaacgcgccactcgccaggctcgtttgatgcagtagccatacaggaagaatgcaagcaagaataatgccaacattacccattcaggaacaaataccagtcgttcgccgataacaccgacggccgccagcaaggccgcagccaaggtaattaggacaaatgcctgtcgggaagtgaagcctgcacgcatgatgagatggtggatatgctggcggtcaggcgagaacggactcatacctttacgcaagcggcgatacataatggcaatcatgtccattagcggaatcgcgataatccacagagcggtaaccggattgatcggatgggttttaccctgagtggtctgcaacagaatccaaatggcggtaaaaccaatcagcgtgctacccgcatcgcccataaagactttatagcggcgccccaacaaaccgagatttagcaagatatatggcgtaatcgccgcaatcatcgcaaaacaccaaaacgccagtgccatatgcccggcctgatagagcaagatgcccatcgcaccgaatgacacgcaagacagcccacccagcagcccgtcaataccgtcaaccatattgaatgcattgatagccgcccacacggcaaacagcgtaaccacgtaaccgaacgggccgagaaccatttcccacgggccaagaacgtgtccaaggctgtgcagatagagtccggcaaacgccatcattactacaccgactaaagcctgaacaaaagcgcggattttaacgctaatatcaaagcggtcatccaaagcaccaacgaacactaataaaccggcgcaagccagatagagtgaaccgaagggaatttgctggctggatatcaggaaggcaaaacagatacccgcatacacagaaataccgccgactaagggaatcagcccctgatggcgtttacggtaattgggtttatcgacgagaccgattctctttgccactttacgggcgatgaataaaaaagctaaagaaaacagcaggacgattagaatctctgtactcatggtgagtaatttcacgttaaacagctctctgcaaaagataaggcagcttagcatgtgagtaaacttactccacgatgcaaaacaacctttcagtcatttcctattagggtgacagcctatattgtttttacaacaatatcctcgttctattcacggagaacctagagctagatacgaaaatgccatcaccattaacggtgtagatctactgatcaaataaataagcgtatttatcgtatattccaaacgtgaaaaacgccacgactgagcgtggcgttttgttcgttttatttaaattacgaacgtctcatcatatcgaagaagtcgtcgttggtcttcgtcatagctaatttattaatgaggaattccattgcatcaatttcacccattggatggataattttgcgcagaatccacattttttgtaattcttcagtcgtggtgagcaactcttctttacgagtaccggaacggttgtaatcgatagcagggaatacacgtttctcagcgattttacgcgccaagtgcaattccatgttaccagtacctttaaattcttcgtaaatcacttcatccatcttcgaaccggtatcaaccagagcggttgcgatgatggtcaggcttccgccctcttccacattacgcgccgcaccgaagaaacgcttaggacgatgtagggcgttagcatccacaccaccggtcagaaccttacctgaggcaggcaccacggtgttataggcgcgagccagacgagtaatggagtccagtaggatgataacgtcttttttgtgctcaaccagacgtttcgccttctcaataaccatttcggctacctgaacgtggcgagacgctggctcatcaaaggtagaagcaataacttcacctttaaccagacgctgcatctcggtaacttcttccggacgctcatcaatcaacaataccatcagcacgcagtctgggtgattgtaggcaatgctggttgcaatgttctgcaacaacatggttttacccgcttttggcggtgctacgatcaaaccacgttgtccgcggccaattggcgaagccagatccaacacgcgcgccgttaagtcttctgttgaaccgttaccgcgttccatacgcaaacgtgaatttgcatgcagcggggttaagttttcaaacagaattttattacgggcgttttccggtttgtcatagttaacttcgttaacttttaacagtgcaaaataacgctcgccttcttttggcggacgaatcttaccggaaatggtgtcaccagtgcggaggttgaaacggcgaatttgacttggggatacatagatgtcgtcgggaccggcgaggtaggagctgtctgctgaacggaggaaaccaaatccatcctgcaatatctccaatacgccgtcaccgaagatatcttctccacttttagcatgttgcttcaggatagagaatatgatgtcttgtttacgcatccgggccaggttttccagccccatattttcgccaagtgtaatcagatcagaaaccggcgtattctttaattcggtaagattcataatggtgggttcttaaactcggggtatgtctcgaactttagtcgtgaatgggtatggcagcgtcatccgtgcctgtttaatggacattcaatctcggccttgtgtgctgcgcgagtaatagcttgcgcaaaattcgcactcaacgacggcaataaattgaaggtaccttagactgattttttaaaaccgttagactgtcaaaaaaccgattgagttcatatatattctcaacgcaaatgtttcgacatagagtaaaactttagattcaaactatttaggtgctacagaattttttagatgctacaaacctagattctactcacaggtatgttctatacgcagtggaataaacttaacacgcttctttgcaggcgtctagcggtcagtgtgaaaatcacacccaccgcaggacacccggcttttgacactaatatcgactacagattttcgtccaggaacgctttcagctggctcttggacagggcacccactttagttgccgcaaccgcaccgtctttaaacagcaacaacgtcgggataccacggatgccgtattttggcgcggtgcccgggttctgatcgatgttcaatttagcgatggtcagtttgccttcgtattcttcggcaatctcatccaaaatcggagcaatcatcttgcacggaccacaccattcagcccagaaatcgaccaacaccaggccagtggcttccagcacgtcagtggcgaagctgtcgtcactcaggtgaataattttatcgctcatgttctactccaaaggattgtgtctacctagttgatgtagcattaaccaacattaggttgactttatttcaccggatacgctttcgtaaagcaatagttagctgatattctaccacactatgagcaaaacacacttgactgaacagaagttttccgacttcgccctgcacccgctagttgttgaagcccttgaaaacaaagggtttcaatattgcacgccgattcaggcgttagcattgcctctcaccctgtctgggagagatgtagcaggtcaggcgcaaaccggtaccggaaagacgctagcattcctggcgtctacttttcattatttgctttcgcacccagcagaagagggtcgtcagactaaccagcctcgtgcattaattatggcaccgacgcgggaactggcggtacagattcattctgatgctgaagccttatcccagattaccggtttgaaactgggtctggcctacggcggtgacggctacgacaaacagcttaaagtgctggaaagcggcgtcgatattcttatcggtaccactggccgtttgatcgactacgcaaagcaaaactacattaatctgggcgctattcaggtagtggtactggatgaagccgatcgtatgtacgatttgggctttattaaagatatccgctggttgttccgccgcatgcctgcggtagaaaaacgtctgaatatgctattttccgctacgttgtcctaccgcgtacgtgaactggcgtttgaacagatgaataacgccgaatacgtggaagtggagccgttacaaaaaaccggccaccgcattaaagaagaactcttctacccttcaaacgacgaaaagatgcgcctgttacagacgctgattgaagaagaatggcctgaccgctgcatcatttttgccaacaccaagcaccgctgtgaagaaatctggggccatctggctgccgatggacaccgcgttggcctgctgaccggcgatgtcgcgcagaaaaaacgtctgcgaattctggaagatttcaccaaaggcgatttggatattctggtagcaaccgatgttgcggctcgtggcctacacattccgttggtgactcacgtattcaactacgacctgcctgacgattgcgaagattacgttcaccgtatcggtcgtaccggtcgtgctggcgaaagcggccattcaattagtctggcgtgcgaagagtatgcattaaacttaccggctattgagacctataccggtcacagtattcctgtcagcaaatacaatagcgatgcgctgttgactgatttaccggcaccaaaacgtctggcacgtacccgcaccgggaatggcccgcgccgtaattctgcccctcgccgtaacggcgcgccgcggaacaacaaccgtaaacgaccaggctgataacgcgatgctaagctccacctcactttatgctgccatcgatcttggctccaacagtttccatatgttggtggtacgtgaggtggctggcagtatccaaacgctggcccgaattaaacgcaaagtcaggctggccgcaggattagatgctaataaccatctgtcacatgaagcaatggaacgcggctggcaatgtttgaagctgttttccgaacagttgcaggatattccgcggcaacaaattcgcgtggtcgccacggcaaccttgcgtttggcctcaaacgccgaccaattcctgcaaacggccattgaaattctgggttgcccgattcaagtgattagcggtgaggaagaagcgcggctgatttatcacggcgtcgctcacactactggcgggccagaaaagcgtctggtggtcgatattggcggtggcagtaccgagctggtaacaggttccggcgctcaggcgtccatattggtcagtctgtcgatgggctgcgtaacctggctggaacgttatttcagcgatcgcaatctgcaacaggaaaactttgaccaagccgaattagcggcgcgtgagatgatcaaaccggtcgcggcacgttttcgtgagcacggttggcaaatttgcgtcggcgcttccggcacggtgcaggctttacaggaaattatggtcgcccaaggcatggacgaactgattacgctgccaaagctgcaacaactgaaacaaagagccattcactgtggcaagctggaagaactggaaatttcaggtctgacgctggaaagagccttggtattccccagcggcctatcgattttgatcgctattttccaggaattgggtatcgaaagcatgacgttggctggcggcgcactgcgcgaaggtctggtgtacggcatgctgcatttacctattgagcaagatattcgcagccgcactattcgtaatctgcaacgccgctatttgctggatattgagcaagcccagcgcgtcgcgcagttagcggataacttttttctacaggttgagaaacagtggaaactagagggtcgatgtcgggaattattgcaaaatgcctgtttgatccacgaaatcggccttagcgttgatttcaagctcgctccgcagcatgccgcctacctgattaggtatctggatctgcctggatttacccccgcgcaaaaactgcttctctccgctctcttgcaaaaccaaagcggcactctggatttatcactgcttagtcagcaaaacgcgttacccgtagtcatggcgcagcgtttatgtcgcttgctacgtctggcgatcattttctccagccgtcgtcgggatgacaccttaccagcggtaagattacgcgccaatggcgacactctgtgcgtgctattaccacaaggctggctgcagctgcatccttatcgtgctgaatcactggtacaagaaagtcactggcaaagctatgttcagtggcctcttactctggaagcgtttggttaagcattatctcgggcggttatagatagccgcccattatttctcccttttcttattcagtaaccctccctcaccactatttcgtctaaaaaaacagtaagcactcgatatgtgatcgccttcatcttaaaaataaaactatgtgtgtatttttatagaacagcgtttctattttaaaattatctcctccatcagaagacagcgctgtctgcgacaactctctccatttcaatgaggaataagaatgcgcgtacagcttcaacgtcgtcatcccctgaatatgctgttgattctttctggtttggcacttgcccctgccacagcattggccgaactgaaagcaccgcaaaatctacaggttcccacgctggcttatgacgaaaacagcttagtattagtgtgggaagcgccgcaagataacggtcaaatcgtcgattatcaggtgtattccgcagggaaactgctgggccttgccagtgaaaataatgaccgatactctccggccaaaccctatatcaatcatttctacgcaaatgataagcagcaatttcagcacaagattctgatacagaatttcaccgtacaggggctacaacctgacacgacttactcgtttagcgtcaaagcgcgctatgctgacggttcactgtcacctgacagtcaggtgattaccgcgaaaacaacggcgttacctcaggtgctgaatattcgtgatttcggtgccaaagacgatggaaaaaccctcaatacccaagcgattcaacaggcgatcaatagctgtaaacctggttgccgcattgatattcccgctggggtgtataaaaccggcgcgctgtggctaaaaagcgatatgacgttgaatcttgaggctggctcgaccttgctgggttcggaaaatccgacggattaccccgcaggctattatctttatagctattccaccgtccagcgtccggcttcgctgattaatgccataaatcctgatcagaccgcgccgggcaccttccgaaatatccgcatcgttggctttggaactatcgatggcaatggctggctccgcgcgaaaaccggcgaaatatcagatgaattaggcaataagctgccgcaatacgccgtgagcaaaaataccaaagtgcacgaagacggcattctagccaaaaatcaggttgaacaggctgtttccgcaggaatagatctaaaaacggcttacggccagaaacgatccagtttgatcaccttgcgcggcgtagaaaatctgtatctagccggattcaccgttcgtaatccggcatttcacggcattatgaatctggaaaaccataacgtggtggctaatggtttaatccatcaaacttatgatgctaataacggcgacggtattgagttcggcaatagtcagaatgtcatggtgttcaataacttcttcgatactggcgatgattgcattaactttgccgcaggcactggcgaaatggctcagcaacaggagccaatgaaaggagcgtggttatttaacaactatttccgcatgggccacggcgctatcgtcaccggcagccatactggcgcatggattgaggatattctggcggaaaataacgtgatgtatctgacggatattggcctgagagccaaaagtacccgctcaatcggcggtggcgcgcgcaacgtcactttccgcaataatgctatgcaagatatcgccaaacaggctgtcgtcatgacgctggactatgcggatagcaatgccaatctggattatcctccggcgaaaattcctgctcaattctatgattttacagtaagaaatgtgacagtgaataaccagacaggaaaaaacgcatccattgagattaagggtgacagtgacaaacaggcctggcaccgtctggtgcatttcgacaatgtgaaattcgatcgggtcacgccaacggcaatcagcgatttacgtgatagccagttcaatcaggttattttcacccagctacgtggcgaaaacccttggcatttcagcgcgataaaaaatgtaaccgtagatgggaaacccgtgacaccatagggttcatcaacagatttccctacccattatttcttggcatttgccaattgagcacgaatactggccagatgactctggcctttttgcatccgttcttccggcgtaatcactttacgctccgattcccagtccaaatcatcctgcggcaattccatcagaaaacggctaggttccggccgcattaattcaccgtattgccggcgttcccgacagtgtgtgaagaacagttcccgctgggcgcgagtgatgccaacgtaggccagacgtcgttcttcatccacattatcttcgtcgatactgctttggtgaggcagtagcccttcttccatgccgactaaaaatacgtagggaaattccagacctttcgaagcgtgcaaagtcattagctgcacctgatccaactcttcgtcgctttctccgcgctccatcatatcccgcagggtgaaacgcgtgacaacctgggtcaaagtcatttgctcgtccagttccgagccttccaacatttccgtcatccagctaaacagcatgttgacgtttttcatccgcatttctgccgctttcgggctgggagaagtttcaaacagccaactttcgtattccattccgtgaagcaaatcccgcactgcggcaataggttcacgctccaccagccgaataatactctccagccagtgggtgaaacgctgtaaagactctagtccacggcctgtcagatgctggctcaaacctaagtcaaagctggcgtgatacaggctcttgtttcggatattcgcccattcgcctagtttctgaatcgttgccgggccgatttctcgtttaggcgtattcacaatgcgcaggaaggcgctgtcatcgtcctgattggttaagacacgtagataggctagcaagtctttgatttcagggcgagaaaagaaagagtctccgccggaaatgcggtaaggaattcggttttgcaccaacaatttctcgaaaagccgcgattgatggttaccgcggtataaaatagcgtaatcaccgtactgagttttcttaataaagtgatgggcgatcagttctcccaccactctttcggcttcatggtcttcattattggcggtaataaccttcagcggttcgccgtaacctaattcggaaaacagtcgtttttcaaaaacgtgcgggttattggcgatcaaaatattggccgctttcaatatcctcccagaagaacggtagttttgttccagcttaatcacctgcaactgaggaaaatcttgattcagcaacaccaggttctgcggccgagcgccacgccaggagtaaattgactgatcgtcatctcccaccacggtaaagcgcgcccgattgcccaccagcaacttaaccatttgatattggctggtattagtatcctgatactcatctaccagcagataacgtagtttgttctgccagcgttcgcgcacttcttcgtttttttgcagcagcagcgttggcagagaaattaaatcgtcaaaatccagtacgttgcaggcttttaagtgatcgtcatataaggtatagcagtgagcaaagatcttatcgcgttccgaacgcgcctgtgcagccgcggcggccggagtcattagatcgtttttccaattagagatcgtcgagatcaactgctgtagctgagttttatcttcttccaaccacttgctggtaagatcttttagcaaccccatctgatcctgtgcgtcaaacagcgagaagttagatttcatccccagcgctttatattctttcttaatgatttccagccccaaagtatggaaagttgaaatcattaaaccgcgagcttctttacgccccagcgtttgcgccacgcgttctttcatctcgcgagcggccttattggtaaaggttacagcggcgatatggctgggcttatagccacactgacggatcaagtgcgcgattttattagtaattacacgggttttacccgagccagcaccggccagcactaggcagggtccggtgacaaattcgacggcttgttgttggctgggatttaatcgcatagcgctcggttactcacggttactctgtgggatggtggggaggaagagtgtagcagaaagaagcgggtgaaaaaaaacgcctgtcattttgctttcccgctttcaagccgccaaaagcttcaatcgtcggcaaaatacgctacactggcggccgattaaaggcgatattcattcaaattacattgtggtgataagtattatggcgaacaaagcttctgcgttgcatattctggtcgatgatgaaaaacaggcaaatgatattctggcgcagttgaacaatggcgctaatttccaggaattagccaagaaatactctaattgtccgtctaaacgtaacggcggcgatctgggcgagtttaacaagggcgatatggtgccagcttttgataaagcggtatttagctgtgaattgctacaaccttatggcccggtaaaaacccagttcggttatcacatcattaaagtgctgtaccgtagctaatattgctgagcttgaatgtaaaaaaaccggcacgcatggccggttttttatagcgaacatctcgagcactgacccatctcaaaatggccagcaaggtagcttgattagcccgcaaccgcgatgcgcttcatatccttcatatacccacgcagcttatgccctaccgcctcaatcggatggttacgaatcgcttcgttaacatcacgcaactgagcgttatctaccgcagtacccgctacgcttttgcccagatccccggcttgcagagaatccataaatttggctttcagcagcggtaccgctgcattagcgaacaggtagttaccgtattctgcggtatcagagataaccacgttcatttcatacaaacgcttacgagcgatggtattggcgatcaacggcagctcatgcagcgattcgtaataggctgattcttcgataatacctgaatcaaccatggtttcgaacgccaattctaccccggcttttaccatggcaatcatcagcacgccgtggtcaaaatattcctgctcggagattttaccttcgaactgcggcgcgttttcaaaggccgttttaccggtttcttcgcgccacttcagcagtttcacgtcgtcttctgcccagtcggccatcatgccgctggagaatgcgccggaaatgatgtcatccatatgtttttggaacagcggcgccatgatttctttcagttgctctgacagcgcgtaggcacgcagtttcgccgggttggacagacgatccatcatcagagtgataccgccctgtttcagcgcttcggtgatggtttcccagccgaattgaatcagtttttcagcgtaggctgcatcagtaccttctgccaccagtttgtcgaagcacagcagggaacccgcttgcaacataccgcacagaatggtttgctcacccatcaggtcggatttcacttccgcaacaaatgatgattccaacacgccagcgcggtgaccaccggttgcagcagcccaggctttcgcgattgccatgccttcgcccttaggatcgttttccgggtgaacggcgataagcgttggtacaccgaaaccgcgcttgtattcttcacgtacttcggtgcccggacatttcggcgcaaccatcactacggtaatgtctttacgtacttgctcgccaacttccacgatattaaaaccgtgcgagtaccccagcgccgccccgtctttcatcaacggctgaacggcctgaaccacggcggaatgctgtttgtctggcgtcaggttgaccactaaatcagcctgcggaatcagttcttcgtaagtgccaactttgaagccgttttccgtcgctttgcgccatgatgcccgcttctctgcgatggcttctttacgcagcgcgtaggctacgtccaggccagagtcgcgcatattcaaaccctgattcagcccctgagcaccacaaccgatgatcaccacttttttacctttcaggtagttcgcttcatctgcaaactcttcacgtcccataaagcgacatttacccaattgcgccaactgctgacgcaggttcaatgtgttgaaataattagccatagtggtactccgttcgatgttgtgttgcgttattttcacatcccccaatctgtgtgagggattctcttgaattcactatatgtcaggaaatccgttgctgaaattgatatatttacaaggtgtcgttgcagattttgcaatataacaatttcctcgccaacgagagccagcgctatggatttacgtgacctgaagctgtttttacatctggctgagagccgccattttggccgctcggccaaagcaatgcatatcagcccatctaccctttcccgccagattcagcggttggaagaaaccatagggcagccgttgtttctgcgggataaccgtaccgtgcaactcaccgatgccggcacccagttgaaagcctttgctcaacaaaccttattgcaatatcagcaattgcgtcatgcgctggggcagcacgggccgtcactgagcggcgagctaagactgttttgctccgttaccgccgcctacagccacttgccgccgattctggatcgttttcgcgccgaacacccactggtggaaatcaaactgaccaccggcgacgccgccaacgccgtagacaaggtgcagtctaacgaagccgatttggggattgctggtcgccctgaaaccctgcctggcacggtagaattcacccaaatcggcgagattccattagtactgattgcgcctgcgctcccctgcgccgttcgtactcaggctgctgaagctcatcctgattggaacaatattccgtttatcctgccggaacacggcccgtcgcgaaaacgcatcgatttatggttccgccgccatcgcattactaacccactgatttacgccaccgtttccggtcatgaggcgattgtttcgatggttgcgctcggttgcggtattgccctgattccggaagtggtggtggaaaacagcccagaacccgtgcgaaaccgtatttctttactcgataatatttcgctggttgaaccctttgagttgggagtctgcgtgcagaaaaaacgtttaaacgaacccttgatcgaggcattttgggggctgctgcacagccccgtttgatgcaaattaaccggcgaggaagaatctaaacgccggattatcggtttcatcgtggcaaatgtagcccagcgcagtcaggtgctgttcaaattccggctcgatctcggatagctcgaagcccgccagcacccggccaaaatcagtgccgtggctgcgataatggaacaacgagatattccagtgggtaccgagcgtattgaggaatttcaacagcgcgccctgtgattccgggaattcaaaactgtacaaacgttcgcgcagcggcttaggaggacgaccgccaaccatatagcgcacatgcagtttggccatttcatcgtcggacaaatccactacctgataaccatccgcctgtaattcagcgatgatttcagcccgttcggcgaatcctcgggtcaaacgcaccccgacaaaaatgcaggcgttatccgcgtccgcgtagcgatagttaaattcggttaccgcccgaccgcccagcaattggcaaaagcgcaggaaactgcctttttgctcaaggatcgttacggctaacagcgcttctcgctgctcacctagttcacaacgctctgaaacataacgtaaaccgtggaaattaacgttagcgccagaaagtatatgagccagacgttcaccttgaatattatgctgctgaacatattttttcagccccgccaacgccagcgcaccggaaggttccgcaatcgcacgaacgtcttcaaaaatatctttgagcgccgcgcagatggcgtcgctatccacggtgataacgtcatccagatattcctgacacaggcggaaagtctcgtcaccaatgcgtttcactgccacaccttcggcaaacagcccgacgcgagccaaatcaaccggagctcccgccgctaatgccgcttgcaaacaggcagagtcttccgcttccacgccgatcactttgatttgcggcatcagttgtttaattaataccgccacgccagcggccagaccaccgccgccaacgggaacaaaaacccgatccaaatgggcgtcctgttgcagtagttccatcgccagcgtgccttgtccagcaatgaccgccggatgatcgaaaggcggtataaaggtgtaaccctgctggcgggaaatttcgatggctttagctttggcctcatcaaaattggcaccaaacaacagcacttcgccaccaaagctacgcaccgcatccactttgatgtctgcggtggcaaccggcatcacaatcagcgatttaatgcccagtttactagcagaaagcgccacgccctgtgcgtgattacccgcagaagcggtcactacgccgcaggctttctgttcttcattcagccccgccagcatggcgtaagcgccacgcagcttaaaactgtgtaccggatggcgatcttcccgcttaaccaaaatggtgttactcaagcgagatgaaattttctccatcacctgtaatggcgtgacctgcgtaacttcatataccggcgcgcgcagcaccgctcgcaggtactctgcgccactgggcgcatcgggtaacgcttgtgattccgccatagcccttaacctcccagcttacttttatcacgaacagcgcctttatctgcgctggttgccagtgaggcataggcacgcaaagcgtaggaaacctggcgtacgcggtttttaggtgtccaggcagcggagccgcgagctaattcggcttcatgacgagccgccagttcagcggccggtacatctaataccatgctgcgctgaggaatatcgatattgatcatatcgccgtcctgcactaggccaatcaggccaccgctggccgcttctggcgaaacgtggccaatagacaaaccggaagtcccaccggagaaacgcccgtcggtaatcaaagcgcagcttttgcctaagcccatagatttcagataggtcgttgggtacagcatttcctgcatgcccggcccgcctttcggcccctcgtaccgaataatcactacgtccccggcaaccacttttccacccagaatcgcctctacggcagcgtcctggctttcataaactttggctgggccacggaaagtcaggctttctttatccacaccggcagtttttacgatacagccgttttcagccatattgccgtacagcacggctaagccgccgtcctgactgtaggcatactcgcgcgtacgaatgcaaccttcctgacggtcggtatccagcgacggatagcggcaatcttgcgagaaagctttggtggtacgaatacccgcaggccccgcggaatacatgcttttgactttttcatcgctggtcagcataacgtcataggctttcagagtttccggcagactcagccccaatacgtttcggacttcgcggttcagcaagccggctcgatccaactcccccaagatccctacaacaccaccggcacggtgcacgtcttccatatggtatttctgagtactcggcgccactttgcataaatgcggaactttacgcgacagacgatcgatatccgtcatgctgaaatccacttcaccttcctccgccgccgccagcaagtgcagaacggtattggtagaaccgcccatggcgatatccagcgtcatggcgttttcaaacgcagccttgttggcgatattgcgtggcagcgcactgacatcatcttgctcgtaatagcgtttagtcagctcaacgatatgtttgccggcatcgaggaataattgtttacgatcggcgtgagtcgccagcaatgaaccgttacctgggagcgctaaacctaaagcctcattcaggcagttcatcgagttggcggtaaacataccggagcaggaaccgcaggtcgggcaggcggaacgttcaatttgcgcgctatcttcgtcgctgacgttcgggttcgcgccctgaatcatcgcatcgaccaaatccagcttgataattttgtctgacagcttggttttacccgcttccattgggccaccggaaacgaaaataaccggaatattcagacgcagagacgccatcagcatccctggggtgattttgtcgcagttggaaatacacaccatggcgtcggcacagtgcgcattaaccatatattccacggaatccgcgattaactctcgtgaaggcagagaatagagcatgccaccgtgtcccatggcgataccgtcatccaccgcaatggtattgaactcttttgccacgccgcctgacgcttcgatttgctcggccaccagcttgcctaaatcgcgcaaatgaacgtgtccaggtacgaattgggtaaaggagttaaccaccgcaataattggtttgccgaagtcatcatcggtcatacccgtagcgcgccaaagtgctcgggcaccagccatattgcggccatgagtggtggtatgggaacggtacttaggcattatctcttcactcctgtgtcttttataaagcaggtggcgaacgaaccacccgcgggttctgtctgtcactttttagttattattgattgataggatccagccagccgtacttgtcttcagtttcgccggtgaacaggccaaagaacgcctgctggattttctcggtaattgggccacgtttacctataccgacctgaataccatcaacgctgcgtactggggtaatttcggcggcggtgccggacataaacacttcgtcagccagatacagagattcgcgagacagcacctgctcacgcacttccaggcccatatctttagccagcttgataatggcatcgcgggtaatacccggcagagcggatgaggtaaatggcggagtgaacaatactccgtctttcacttcaaacaggttctcgcccgcaccttcggacaagaagccgtgaacgtccagcgcaatcccttcctgataaccatgacggcgcgcttcgctgcccaccagtaaggaagaaaggtagttaccaccggctttagcggcagttggaatggtattcggcgcaacgcgattccaagatgaaaccattgcgtcaatgccctgtgccagcgcttcttctcccagataagcaccccaagggaatgcggcgatgataacgtcggttttgtagccttccggcggattaacgcccattcccacgtcaccgataaacaccagaggacggatgtaggcgctagtcagtttatttttgcgcagcgtctcgcgacaggcttccatcaactcatcgacggattgtgaaactggcatccgatagatcttggccgaatcatgcaaacgctgcatatgttcgcgatggcggaatacaaccgggcctttatgcttggtttcatagcaacggacaccttcaaagactgatgttccgtaatgtaacgcatgagacattacgtgaactttggcttctgcccacggaaccatttcgccgttaaaccaaatgtaatcagctttcttagtcattctgtactttccttctagcgcctcaggcgcgtatttgtaatgtattggtctgctggatttctacactcgcaacatccaacaacttattcaactgagaagacagtaaatctaccgaacgttggctagcaacggtcagctcgatattaatattttcgttattaaggataggcgacatattcatagcacaaacctgaaagccgcggtggcgcaccactcgcaatacgcgctctaacatttcagggcggaagcgggcttggatcgagagctgatgttgcatcatgaaattttctccagcatggtttcgttacctgcgcccggcggaactaacggccagacattttcgagttcgtcgatggaaacctgaagcaggtacgggccggtactgttaaacagagcgtccaatgcggcatcgacttggtctttgcgggtgatacgttggccgggaatatcaaaagcgctggccaaagtgatgaaatcggggttatcggataagttggtctcactgtagcgggcatcaaagaacagctgctgccactgtcgaaccatgcccaaacgctggttatccaacaaaacgatcttcagcggcaactgtttgcgctttatcgttcccagctcctgaacattcatcataaaggagccatcgccggacacgcagataaccatgtcgtcccgacgagccatttgcgcaccgacggccgccggaacaccaaagcccatcgtgcccaacccgctagaagtgatgaagttttccggacgggtaaaactcatatgctgtgcagtccacatttgatgctgaccgacatcggtagtgataacggtttcaggccctttacgatcggaaatctgtttcagtaacagcggcgcataaattgcttgccccggatggtcataacgccagctatgctgctgcttcaacgcaataacttcatcgcgccacggctggatgtccagaggttgctgcaacgcgggaagcaaggttttcaaatcaccctgcaaagcaacgtgagcctgccgcagtttgttcaactccgtcggatcgatatccatatgaataactttggctttcggcgcgaacgcgttcaacttaccggtcactcgatcatcgaaacgtgctccgacggcgatcaacaaatcgcactcctgcaccgccagattggctgccttagtgccgtgcatacccagcatgcctaaatagcaaggatgctcagcgtcaggggcacccaaccccttcaaagtcactacggcgggaaccccggtttcagcgataaacgctcgcaaggcaggcaccgcctgtgccatacctacgccaccaccgacataaacgatcggttgtttggccgcacttaacatgtcgtaagcctgctggcgttcggcactggaatccagatagtgttcttccaccgacagcaaatgcggatgtaactctgcgacagctaactgaatatctttcggaatatcaatcaaaaccggcccagggcgaccgctactggcgatggcaaaggcttcagccataatgcccggcaacgcgtctaaagactcaaccagaaaactgtgtttggtacaggccaaagacagccccagcacatcaatttcctgaaaagcgtcggtgccgattaaggcagaacccacctgaccggtgatagcgataatcggaacagaatccaataacgcatctgccagacctgtgatcaagttagtggctccggggcctgaagtggcgatgcacaccccgacctttccggttgcacgagcataaccgatggcagccattactgccccttgctcatggcgacacagtagatgttcaacgccaccgtcatacaaggcatcgtagactggcataattgccccacccggatagccgaataccgtctctaccccttgcgcacgtagcgcttgaaccacccactgagcaccattcatagttatttccccgaacttttgcgagcgacacaggattttattctgttgtgcattttacgttcaccgcgtctttttaccggccaataaaaaacccccggacctttcggtgcgggggttctcttgtgattaaggcttgatttttatgcctttcttcgtccaagtgcagccccgcacggtgggataataatcaccaccacgctaattaggactaggttaatcacttggacgaaagctttcataatcggttgttcacatgtctgttgtcgaacgaatacctacagagttatcacagttattatcgctatgacaatatttttttaaaaagtcattttgtgacccaagactacaattgcaataattgtgttaattatcaaacgataaaaccgatatttctttccctgatttttgtacagaaaatttacgcttaacgtccccatgcttaaaaaaatgtcagagatacttttgcactgagcctgaaatttcttcataaccgagacgtttttacgataggccacgcaaaattcatgtcttccctcgtaatcaaaacgatagttttcgcgccttctcgcaggctaaacaccaccctaatgacaaaaaaactcaattcggcaagataccaaacatcagaagggggaaaactatgtcactggccgtcatccatacccgcgcttccattggcgtacaagcacctccagtcaccgttgaagtgcacattagcaacgggttaccggggctgacattagtcggattacccgaaacaacggtgaaagaagcgcgggatagggtacgtagcgccttattaaacagtggatttacctttccggctaaacggattaccgtcagtctggcgccagcagacttacccaaagaaggtggtcgctacgatttgccaatagccttagccatcctcgcagcctcagagcagatccccgtagataagctaggtcaatatgagtttcttggtgaactcgccctgtcaggcggtttacgcagcgttagcggcgctatttcagccgctctggccagtacaggcgcctctcgtctgttaatactgccctgcgccaatgaaatggaagttggcttaatcgtcaaaggaaacagtttggttgcagagcatcttctggctgtttgcggttttctgcgtggagaaggctcactttcctccccaaaacaagcaagtgattggcaggaatgggataacacactcgacctgcaggatattatcggccagcaacaggctaaacgcgcactggaagtcgccgctgccggaggacataacttactgttacttgggccacctggcaccgggaaaacgatgttagccagccgattaaatggtttactgccacccttaagcaatcaggaagcactggaaactgccaccgtagccagcttactgcaagggcatcaggctcccacgcattggtgcaagcgcccatttagatcaccacaccatagtgcatcaatggcagcgttaattggcggcggttccatacctcgtcccggagagatctcgctggcacacaacggcgtgttatttttggatgaactgcctgaattcgagcgcaaggtactggactcattacgggaacccttagaatctggcgaagtggttatctcgcgagcaacggcaaaagtgtgtttcccggccaaaatacagcttatcgccgcgatgaaccccagccccagtggacattatcaggggcgacacaatcgcgcacagccacagcaaatactgcgttaccttgccaaattatccggcccattcctcgatagatttgatttatccattgaagtgccattgctaccgaaaggtttattgaggatgcaaaaaaatagcggggaagatagcgcaaccgtcaggcagagagtattacaggcaagagaaaaacaattgcatcgttcaggaaagataaatgcccaactcaacagcaaagaggttgctcgattttgtgcggtcacgccgcaagacgcacaatttcttgaacaagtgctgctgaagctcggtttatccgtacgagcctggcatagaattttgaaagtcgcgcgcacgctggccgatttggcacaacaggatgacattcaaaagccacacatttctgaagccttgagctatcgttgtatggatcgtttactgttacagctacacaaagcgttgacgtaaaaatggggctttcgccccatttctattagtcatcgctatcgacatagtcttccgttgcatctgcctgcggtttaccgccagacagcgtatggaagcgctttggacgccggattcgggtgatgtatttggaccacactttttccgcatcgctaacaggctcgcgctcgccacgacaaacggcaacaaacagttgctcttcttcgtttgctggctcacgtttgcctaaatccagctcgttgaaagcatagccatggcgctctagcaattgcgcctctttaatggtgaaatcaccgtgacgcgagaacccgcgaggatagtgtttgttatcaaaaaaacgattggttgtgatgaagctatccgccatctgacacgctcctaattctgtcatggtcgtgctgtttatggcgcggagtattagataggcttgacatcgtgtaaaacaaaacatttaaatcttaacgacaaaaaaaattggagataggtgtggacaccgaattactgaaaacctttttggaggtcagtagaacccgccactttggccgcgcagcggaatctttatacttaacacagtcagcagtgagttttcgaatccgtcagttggaaaatcaattaggtgcaagtttattcactcgccaccggaataatattcgtctgacgccagccggcgaacgtttggtgccctacgcagaaaccttgatgaatacctggcagttggccaagaaggaggtcatacactctcttcagcatactgagctatcgattggcgcaacggcatcactatgggaagcctatctcactccatggttacagacactctatctccaacgagaagggctgcgactcgaagctcgtattgcgttacgccagtctttagtgaagcaattgcatgaacggcaactcgaccttttaatcactaccgagccgcccaaaatggacgaattagccagccaactgttagggaatttttcattgcggcttttttcatcaggtcagcaagataaaaccgaagaaatgccgtatataaaactggagtggggggcagattttcatcaacaggaaaatcgcctgttagaccatgagcaaatgccagttctgacaacgacttctgcccatttgacgcgacaactcttagacacgactggcggctgtgcatttttacctgagcattggcaaaaagattacccgcagcttgttgctaacccggagatccccgcaatagtgaggcctatgtacgcggtgtggctacaaaatagcgatcagcagatattaatccgccaattattaaaaactccgatgaataacgccactgaaggggccacacggagttaatcgagaaacgcttagcccatgattgcggaatcatataaaaagctctcattgccttctgggcggcaataaagcgcaatgacagaacggcaatggtcatcttccccaccatgaaccgacagtaccgcgaaagagaacataacccaggattaagttctaaatcagcacgctaaacagcgtgccaacaccctagttaattaggttgccatctatcaccatcgctgcgagcacattctattctgcttcgctgagaaacaacgcttagcctatcgagatggcaggaagtgaaagtaatttcagataatctagcgagcattctggatagcatatagacctctgtactgatgtatttgtatccgtacgaatctccccattccagagcgactatttccatcaatcgcgcaaacgtggcgcccaaaatacggggaaaaataccaaagccgcggctaacagcataatcattgctaagggtgtaaaatagtttctatagtgaatacagtgcaaccaagctatccaatcatgggaataacgaactgggaaccaatgaacgacagaccaatctgattgcacctaaaggcaatactcaactgacttgttgctgataccaaactatccataacagactgtttaatattgttttgtgcattactattcgcaatagacctgaacagatatttcccgcataagtgattgaataataagaatattgccgttttaatccggcttcctcgcctcgccatatatcgacaattgtaagcgtaatgcctcgttttctatcattatgtaaatactttcgtttccacaaacaccctgtctctttgaaaccgacgttaaaaaaatcacgactgagaaacaacctgacctgcagtgcatatagtcgttaccacaccagctgcaaacattggtgtcaattttcttatcacagggttccttcacggcactatcatctcaaggtgacaggtaacatttctatattattcaaaaaataagcagagaattcataaacaatctgagtgggtcagaattgattcaatctttattgaagagagacaaatgcagattattaattaattctatatacaagttattgtagtgataataagtagaattccactataaattaacaatgtgctgtacgaaattggccttaaaaatgtaattaattaacactggctctttgaattttaagattatttaatatatttaacgagaaaatgagggctacttcggcgggatacgaatgaaaatcagacaataacaggaggtcaggaggtcaggaggtcaggaggtcaggaggtcaggaggtcaggaggtcaggaggtcaggaggtcaggaggtcaggaggtcaggaggtcaggaggtcaggaggtcaggaggtcaggaggtcaggaggtcagggtaatggataataactgcaaaagtgtagcttttatttgtttgatccaaataaaaaacccctcgctttcgcgaagggttatttatttggcaggggcggagagactcgaactcccaacacccggttttggagaccggtgctctaccaattgaactacgcccctaaaagagggtggcggaacggacggggctcgaacccgcgaccccctgcgtgacaggcaggtattctaaccaactgaactaccgctccaccgattctgttacttatacttccgtatatattcccgttagggccagcatgtccttgctgtttagccaccagatgtcactctgataacttgtgtttgatgcctggcagtgtcctactctcgcatggggagaccccacactaccatcggcgctacggcgtttcacttctgagttcggcatgggatcaggtgggaccaccgcgctattgccgccaggcaaattctgtttcaatcaacccgccacgtgatttacaccacacagccagtcaatccaatctgttaacaatgctgaaaatcaaaacgctctctaaaacaccttcggtgttgtaaggttaagcctcacggatcattagtactggttagctcaatgcatcgctgcacttacacacccagcctatcaacgtcatagtctttaacgttccttcagggggcttaaagccccagggaagactcatcttgaggcaagtttcgcgcttagatgctttcagcgcttatcttttccgcatttagctaccgggcaatgccattggcatgacaacccgaacaccagtgatgcgtccactccggtcctctcgtactaggagcagcccctctcaatcttccaacgcccacggcagatagggaccgaactgtctcacgacgttctaaacccagctcgcgtaccactttaaatggcgaacagccatacccttgggacctacttcagccccaggatgtgatgagccgacatcgaggtgccaaacaccgccgtcgatatgaactcttgggcggtatcagcctgttatccccggagtaccttttatccgttgagcgatggcccttccattcagaaccaccggatcactaagacctactttcgtacctgctcgagccgtcactctcgcagtcaagctagcttatgcctttgcactaacctcacgatgtccgaccgtgattagctaaccttcgtgctcctccgttactctttgggaggagaccgccccagtcaaactacccaccagacactgtcctcaccccagattatggggccgagttagaacatcaaacattaaagggtggtatttcaaggttggctccacgcagactggcgtccacgcttcgatgcctcccacctatcctacacatcaaggctcaatgttcagtgtcaagctatagtaaaggttcacggggtctttccgtcttgccgcgggtacactgcatcttcacagcgagttcaatttcactgagtctcgggtggagacagcctggccatcattacgccattcgtgcaggtcggaacttacccgacaaggaatttcgctaccttaggaccgttatagttacggccgccgtttactggggcttcgatcaagagcttcgccttgcggctgaccccatcaattaaccttccagcaccgggcaggcgtcacaccgtatacgtccactttcgtgtttgcacagtgctgtgtttttattaaacagttgcagccagctggtatctgcgactggcttcagctccgagagcaagtctcttcacctagcgccagcgtgccttctcccgaagttacggcaccattttgcctagttccttcacccgagttctctcaagcgcctgagtattctctacctgaccacctgtgtcggtttggggtacgatttaatgttacctgatgcttagaggcttttcctggaagcttggcatcaactacttctgcaccgtagtgcatcgtcatcacgcctcagggttgatggttttccggatttaccaggaatacccccctacacgcttaaaccgggacaaccgtcgcccggctagcctagccttctccgtccccccttcgcagtaacaccaagtacaggaatattaacctgtttcccatcgactacgcttttcagcctcgccttaggggtcgactcaccctgccccgattaacgttggacaggaacccttggtcttccggcgtgcgggtttttcacccgcattatcgttacttatgtcagcattcgcacttctgatacctccagcagtcctcacagactaccttcaacggcttacagaacgctcccctacccaacaacacctaagtgtcgctgccgcagcttcggtgcatggtttagccccgttacatcttccgcgcaggccgactcgaccagtgagctattacgctttctttaaatgatggctgcttctaagccaacatcctggctgtctatgccttcccacatcgtttcccacttaaccatgactttgggaccttagctggcggtctgggttgtttccctcttcacgacggacgttagcacccgccgtgtgtctcccgtgataacattcttcggtattcggagtttgcatcggtttggtaatccgggatggacccctagccgaaacagtgctctacccccgaagatgagttcacgaggcgctacctaaatagctttcggggagaaccagctatctcccggtttgattggcctttcacccccagccacaagtcatccgctaatttttcaacattagtcggttcggtcctccagttagtgttacccaaccttcaacctgcccatggctagatcaccgggtttcgggtctataccttgcaactagacgcccagttaagactcggtttccctacggctcccctatacggttaaccttgctacaaaatataagtcgctgacccattatacaaaaggtacgcagtcacaccacgaaggtgctcccactgcttgtacgtacacggtttcaggttctatttcactcccctcgccggggttcttttcgcctttccctcacggtactggttcactatcggtcagtcaggagtatttagccttggaggatggtccccccatattcagacaggatgtcacgtgtcccgccctactcatcgagttcacagcatgtgcatttttgtgtacgggactatcaccctgtaccgtgcgactttccagacgcttccactaacacacaaactgattcagactctgggctcctccccgttcgctcgccgctactaggggaatctcggttgatttcttttcctcggggtacttagatgtttcagttcccccggttcgcctcgttagactatgtattcatctaacgatagtgcaacgaattgcactgggtttccccattcgggtatcgtcggttgtaacgcttcatatcagcttaccgacgcttttcgcagattagcacgcccttcatcgcctctgactgcctaggcatccaccgtgtacgcttagtcgcttaacctcacaacccgaaggtgtctttcgacatcatcgtgctgcgattattgagagactctacctgcaggtgactccttgtctcggtaaatctacggagagacaagttttagctgcagtgtttcaattttcagcttgttccagattgttaaagagcaatatttcacaacatactgtccaccttgcggcagcaatatattttgaaatagttttatatggtggagctaagcgggatcgaaccgctgacctcctgcgtgcaaggcaggcgctctcccagctgagctatagccccatataaaaagcaaataccttattgctgcaactcatgtccagacaaggcgcagacacgcacgtttattgttataaacgaatgtgacggtaacgcactacagggatgagttggtgggtctgagtggacttgaaccaccgacctcacccttatcaggggtgcgctctaaccacctgagctacagacccaacaaggtactaaagcccgactaatctctcagcccggccttatttgctcgttactttctatcagacaatctgtgtggacactgcgcaatgcgtatcattaggtaaggaggtgatccaaccgcaggttcccctacggttaccttgttacgacttcaccccagtcatgaatcacaaagtggtaagcgccctcccgaaggttaagctacctacttcttttgcaacccactcccatggtgtgacgggcggtgtgtacaaggcccgggaacgtattcaccgtagcattctgatctacgattactagcgattccgacttcatggagtcgagttgcagactccaatccggactacgacagactttatgtggtccgcttgctctcgcgagttcgcttcactttgtatctgccattgtagcacgtgtgtagccctactcgtaagggccatgatgacttgacgtcatccccaccttcctccggtttatcaccggcagtctcccttgagttcccaccatgacgtgctggcaacaaaggataagggttgcgctcgttgcgggacttaacccaacatttcacaacacgagctgacgacagccatgcagcacctgtctcacagttcccgaaggcaccgaagcatctctgctacgttctgtggatgtcaagagtaggtaaggttcttcgcgttgcatcgaattaaaccacatgctccaccgcttgtgcgggcccccgtcaattcatttgagttttaaccttgcggccgtactccccaggcggtcgacttaacgcgttagctccggaagccacgcctcaagggcacaacctccaagtcgacatcgtttacagcgtggactaccagggtatctaatcctgtttgctccccacgctttcgcacctgagcgtcagtctttgtccagggggccgccttcgccaccggtattcctccagatctctacgcatttcaccgctacacctggaattctacccccctctacaagactctagcttgccagtttcaaatgcagttcccaagttaagctcggggatttcacatctgacttaacaaaccgcctgcgtgcgctttacgcccagtaattccgataagcgcttgcaccctccgtattaccgcggctgctggcacggagttagccggtgcttcttctgcgagtaacgtcaatcacttcacgtattaggtgaaatgccttcctcctcgctgaaagtgctttacaacccgaaggccttcttcacacacgcggcatggctgcatcaggcttgcgcccattgtgcaatattccccactgctgcctcccgtaggagtctggaccgtgtctcagttccagtgtggctggtcatcctctcagaccagctagggatcgtcgcctaggtgagccattaccccacctactagctaatcccatctgggcacatccgatggcgtgaggccctaaggtcccccactttgctcttgcgaggttatgcggtattagctaccgtttccagtagttatccccctccatcaggcagtttcccagacattactcacccgtccgccgctcgccggcaaagtagcaagctacttcccgctgccgctcgacttgcatgtgttaggcctgccgccagcgttcaatctgagccatgatcaaactcttcaatttaagatttgtttgatttgctaccgaagtagcgatgctcaaagattactttctgcaaatatgcattcgaaccgaagttcaaatgtttactgctttggtcactcttcaagacttgatatttcttctgcctgccgaaacaggctttgatatcgtcttgcgagtgcccacacagattgtctgataaattgttaaagagcgttcgttacccgttcgcttgcggcgaatcttacggtaacgcgggaggcagataatacgctttcccgctgaagtgtcaagcttttcttttcaactttcgttttaagaaccggcgtttccgcctgcttaacacttcctgacccggcgaagtttgtttcgttgttcccggtcagtggaggcgcattatagggagttcctgacaggctgcaacccctaatttcaaataattttccaaccggcttttttttaggcaaaactccattaaattgcgagttttttcagcattggaaagccataaccctgtaaaacgggcaataaagcatcagtatccgcatctaacgccatgcaataagccacattatcttcctgagtagaaatgacattctcttgtgaagaaatcagccaggcagttctgcgggcaatcgcagcaccggaatcaaccattcgcgtcccctctggcaacacctgcgccagctcttcagctaatagagggaaatgagtacagcctaataccacggtgtccggcggctcacgcatactcagccacggattaaggattttctttaatgcagaaagaggcacttccccaccgtgtaatttggtttccgccagttccaccagctcagatgaacccaacagctcgattttgcaatcagtcgcaaagcgcgcgatcagatccagagtatatgaacggtgcacagttgcccgagttgccaatagcccaacgacaccattgcgggttaaccgcgccgcaggcttgattgcgggtacgacaccaacaacagggaaagagaagcgctcacgtaaagctgggagggaaacggtgctggcggtattacaggcgatgacgacaatggcaaggggatgttgttgctgaaccgcagtgacgatctctactacacgctcgacaataaactcttcggacttctctccataaggaaaggcgacgttatcgaaagcatatatatagtgaagatccggcagaagctgccgaatctcttggtacacagacagcccgccgacgccggaatcaaaaatcagcgccgtcggacgaatggaagtgtctgccttagaagttatagcttccagtgaagtagtattcgcgtcctggggtttggtagccataaaccgtctcataatctttatcaaacaggttggcgattctaccacgaaccgtaagatgagaggtgactggatatgacacagcaagatcccacaagcttacaccaccgagttttaccgttctttcagggtaaacactgtagtctttgtcataacgctgcccaagatactgataggttatagaccaatccaaatcagcaacttgccagtccaactggtatttaacctgttgtttagcacgacgagtcagaacttcattagtttccgcattgcgtggatccagatattccaaagtaagctgatgcgataacggtccggtatcgaatgaacctgtccattccacgcccttaatggtggcttgattgacgttgaaatagctactggtcagattgctgtaatcaataagttgttcaatatcattacggtaagcggacaagcgccagtttaacgccccggtcagcccttcgatacccccttcccattgcttgctttcttctggcttgagattggcattaccaccgaaagcactatatagctgcatcaggttaggggctttataggccgttccataggaaccgataagccgatagccctcaacaaactcccaaccagcactggtttgccatgtggaatgccagccaaattgggaattatcgtcgcttcgcactgagccttccaaggtaacatcactaacttgctgctgccctgtcagataaataccggtattacgctgtgtaaaatcagaggtggtattcgaattgctactcttacgctcggttttctgctcctgccaatcagctccagcggcgatcgtgccattcgccacctggaaagtattaccccactgtaggttatattgctcagcatcgtctaaagaggcggtaatatcatgggggccaaagagtgggctgtaattataatctttggtgcggttatagctggctatcagctgagaggcataaataccgtttttatagcgtagccccgtatcataggtgcgactagacaatttacgcgtatctatcagtgctaatgggttactgaaattagcatagccgtcatagtcactgcggttatcgaaaccgtatacacgggcaaaaccattaaactgctcgttaaattgatgctctaatcctgcccacagcatttttcccataaaaccatcgcggtcaggctgacgtgggccaccagcttccggcatccccgctacaatgtcatatcctttggtgtaggtataattaccagccaaagtgattgtagtgtcttcacccaacttttgctgtgttgaaccatcgtaggtttgataaccgtgagaacccagccctgcagataaagttgtgcccgggttctcacgcgcggtaagaatgttaacaaccccgccaatcgcatcagagccatataccgcagagcgtggcccacgaatatattcaatacgttgtaccaacgaaatcggaatttggctgagatccgatgcgccagtgatcccggcctgatttaatcgaacaccgtcgatcaaaaccagcacatgccgggattcggtgccacggataaacaacgagctacgctgccccataccaccgtcttgcgcaatatcaacacccggtaaacggcgtaaaacatcattaatactggtcgcctgccagcgcacaatatcctcacgggttacgatattcattggcgctaatacgctggatattggctgagggaagcggtttgcagtgaccaccatttggtctctagtgtcagaagaggtgttggaactgtcttgcgcccagccagaaaaggctgtcacagatagagccgtgaacagcgtatattttttaattgtcatgaaaagcatccaaacttaattggcggatgccgcagaaccatggccggtagcacgcgacggccacaaatattgcgacgtaataccggcaggttttcgggcttgggatttattgcctcaacctccttattaaagtgcgaactcttaatagatgaggtaaagcaataccgggcgatgacttcccatccgctatggacagtgtctgttaataaactatcgccgtgacttccccttaccgctgcgcgtcagctctggattcacaccagattcccatttcactctcagctggaggccggacggcaatgctacgatcaacataaatagatgtctagactgctatgattgtaacgaggaataaacacgacaaaactggacttcatagtcacatcccctacaatcccgcaggaataaccatcctttttactgccagacgagacgaaacatgacccccgacatcctgcctactgaaaattacgatcaccaattggcggagaaaattgcctctctcaaagagatgatgtcgccgttcaaggcacctgaaccggaggtttttcgttctccggcagaacattaccgtatgagagccgagtttcgcgtttggcatgatgaagatgagctgtaccacatcatgtttgatcagcacaccaagcagcgtattcgcgttgaacaattccctgtcgccagcgtactgatcaaccgtctgatgagcgcgctaatgaccgctatccgcgcgcagcctattttgcgtcgcaaactgttccagattgattacctatcaacacgcagcggcaaaatcattgcttctttactgtatcaccgtcaattggacgaagaatggcaacagcacgccatggcattgcgggatcagctgcgtgctgaaggctttgatttacaattgattggtcgcgccgctaaaaccaaaatcatgttagatcatgactatgtcgatgaaattctaccggtcgctggccgcgatatgatttatcgtcaggtagaaaacagctttacccaaccaaacgccgcggtaaatattcacatgctggagtgggcgctggacgtcactcaaggtgctagcggcgatctgttagagctgtattgcggtaacggtaatttctctttggcattggcgcgaaattttgatcgggtactggctaccgagattgctaaaccttccgttgcagcggcacaatttaatattgcggctaaccatattgataacgtgcagattattcgtatgtcggcggaagagtttactcaggccatgcagggcgtacgtgagttcaatcgcctgaaaggtattgatctgaaaagctataactgcgaaaccatttttgtcgatcctccacgcagtggcctggatgacgaaaccatcaagatggtgcaagaatatccacgtattctctatatttcctgtaacccggaaacgctgcgagctaatctagaacaactacaacacactcataaaatcagtcggctggcgctattcgaccaattcccttatacccatcatatggaatgcggtgtgtggctggaaaaacgcgactaatcagacagcaaaaagggcaacatagcgttgcccttctgatttcagcctaatggattcccactcaatatttcatgccataagcgggtatttcactgtgattctgttgctgctgctttacgcgccttcagtttgaagaaaatccagaataccaatatcacacacaggatagacggcaaaaaattcgagcctatctgcggatactcgacccgaataatggcactgtaggccagaatacccagcaggaaacacgccgaagccagtttaggcagccccaacggcattgggtagttaagataacgctgatgcagacagtaaacggccagaaccaaagccagcaacgggaatagcgaaaaagaaacgaatgagctaaacaatgcggcaaaagaaccgtttactgcaagcccggcaatcaacgccaatataagggtgccattttcacggcgaggttgttccatcatcttcttccttactttacttttcttcaacacgggatacagcaagcctttcctgttcacggcgataccaataataagcgcccttggaaatcatccgtaactgcaagactaaccgctcctctaactgtcgccgttgttcaatatcaacgtccagcacttccgcaccggcactgaacacaattgtgaccatggcctcagcctgcgcttcggtgaagctgcgcggcatatgattttccaattcgagatagtcggccagttctgcaataaaatgctgaatttcgcgggctacagcggcacggaaagccgccgaggtaccggaacgctcccgtagtagcaaacggaaggcattcggattgtttccaataaactccataaaggttgagaccgaggtgcggataacgctaccgcctttggctatgcgttggcgagcctggcgcatcagttgacgcaacatcaggccactttcatccaccatagtcaggcccagttcatctacatcgcggaagtggcggtaaaatgaagtaggcgcaataccggcttcgcgggaaacttcccgcagactcaagctagcgaaactccgctccgcactcagttggctgaacgccgcttcgatcagggaacgacgcgttcgctctttttgttgtgctctgacgcccataatcgtacccaaaagatatccattttctttagctaagccatatagtaagcaatataccaaactttatagtaacaacgactatacaaacacatcatccttatccgcgtaagaacgaatttacagcaggagccaaagccaactgcctaatgatgattgggttatttataggatgatgttaatgtatcgttgtaattttgtataaaaataggtctctcctacatgcaacagcacttccattttgatgccatcgttattggctcgggccctggcggtgaaggtgccgctatgggattggtgaaacaaggggctcgcgttgccgtgattgaacggtataacaatgtgggcggtggatgtacccactggggtaccattccttccaaagccctgcgccatgccgttagccgtattattgaattcaaccagaacccactttacagcgacaactcgcgtgccatcagctcctctttctccgatattttgcgccacgccgatcgggtcattaaccagcaaacccgcatgcgacaaggtttttacgatcgtaaccattgtcagatgttttccggtgatgccagctttgtcgacgccaaaacccttaacgtacgttacgccgacggcacgtccgatcgcctgacggccgataacatcgttatcgcgaccggttcgcggccttatcgcccggagaacgttgattttacccacgagcgtatttacgacagcgacactattttgcagctcagccacgagccacagcacgtcattatttacggtgcgggagtgattggctgtgaatatgcatcgatcttccggggattgagcgtcaaagttgatttaatcaacacccgtgatcgtctgctggcatttctcgatcaggaaatgtccgatgcgctctcctatcacttctggaataacggcgtggttatccgccacaacgaagagtttgagcagattgaaggcactcctgatggcgttatcgtccacctgaagtccggcaagaaagtgaaagccgattgcctgctgtatgccaacgggcgtaccggcaacaccagcggactcggtttggaaaatatcggtctggaagcggacagtcgtggtctgctgaaggtcaatagcatgtaccaaaccgcgttgcctcatgtctatgccgtaggagatgtgattggctatccaagtctggcatccgccgcttacgatcagggccgaattgctgcgcaggccatgattcaaggggaagcgcaggttcatctgattgatgatattcctaccggaatttataccattcctgaaatcagctccgtcgggaaaactgagcaggaactgacagcgatgaaagtgccttatgaagttggccgggcgcagtttaagcatttggctcgggcgcagatcgtcggtatggatgttggtagcctgaaaattttattccatcgggaaaccaaacagattttgggtattcattgctttggcgaacgcgccgcagagattattcatatcggtcaggccattatggaacaaaaaggtgaaggtaataccctggagtatttcgtgaatactaccttcaactatccaaccatggccgaagcctatcgcgttgcggctctcaatggcttaaaccgcctgttctaacggcgcgctcatgcgaatttgcatgtgatcgcgtatcgcctcggctagttgctcatagcggccacgcaatggggagccggggcgataaaccagagcaatagtgcgcttcggctccggtttgtagcattccagatagcagacaccgtcgcgctctttttcttttggtaccgccagtgatggcaataaggtgatgccgctgcccgccgcgaccatattgcgcagagtttctaaactggtcgcgcgaaaatgggtatcttcctcagcacccgcctggaagcaaaaacccattgcctgatcgcgcaagcagtgaccatcttccagcatcaataatttttctcctgctaattcatgcatttgcacgcggtcacgcttcgcccatggatggtcggaataaaccgccagattcattggctcatcaaataacggcacttcgataaaagcttcggtctctttgaccaacgctaaaatagcgcaatccagtttaccgctgtccagctgtgccaacagattatgagtctgcgcctcgtgtagatacatctccagctttggaaaagcctgatgcagcatcggaataatttgaggtaataaatatggcccgacagtgggaatcaaaccaatatgtagcggcccggacatactctcgccctgcaaactggccatctctttgagcacttttacttcccgcaatacggttctggcctgatccaccaacagcaagccagcctgggtaaacagcaccttacggctggttcgctccagcagcatcacacccagttcatcttccaacttacgaatctggccgcttaaggtcggctggctgacatggcaggaatccgcagcacgtcggaaatgacgaaactcggccaaagccaccagatactcgagatcgcgaatgttcatctgctctccactttatgatagtcaataacgataggtaagatagcaaccagtgattagatctatcaagagataaagtaaataatgtgtctcaagaaagaaaagcctaactaaatgaaaaattatgttttctaattaaggagttacacatgtttaccagccaagaaggtaaaaaagtcccacaggttactttccatacccgtcagggcgaccagtgggttgacgtaacgactgatgacctgtttaaagataaaaccgttatcgtattttcactgccgggcgcgttcaccccgacctgttcttccagccatttaccgcgctacaacgagttatccggcgtgttcaaacagcatggcgtagacagcattctgtgcatttcggtcaacgacactttcgtaatgaacgcctggaaagccgaccaacatgccgaaaatattactttcgtgccagacggcaacggtgaattcaccaaaggcatgaacatgctggtagagaaggccgaccttggctttggcccacgctcatggcgttactccatgctggtacgcaacggcgtggtagaaaaaatgttcgttgaaccaaacaaaccgggcgatccgtttgaagtgtccgacgctgacaccatgctgaaatatttagcgccagaatacaaagtgcaggaatccgtggctattttcaccaaaccgggctgcccattctgtgctaaagcgaaacaaatgttgcaggatcgcggtatacaatatgaagaaatcgtactgggtaaagacgcaactaccgtgagtctgcgcgccgtcagcggccgttcaactgtaccgcaagtgtttatcggtggccgtcatattggtggcagcgacgatttagaaacctatctgccagcctgattacatcaataaaaaagaagccaacgtgaagtattttggtaggcctcggcctacccttttttcctgttaggagcggatatgaaaaccttaaacgtagatgtcgccgtaatcggtggcggcaccgccggtctgggcgcttatcgcgcagctaaactttccacccccagcgtggtaatgattgaaggcggcgaatacggcacaacctgtgcccgcgtaggctgtatgccttccaagttattgattgcagccgccgaagcggtgcatgaaattgaaaaggcgcccggctttgggatctatccgcagggaaaaacgctgattaatggacgcgaagtcatggatcgcgtgaaacgtgaacgtgaccgtttcgtaggcttcgtattggaaggtgtcgagagcattcctgccgtggataaaattcagggctacgctcgctttattgatgacaacaccctgcaagtggacgatcacacccgtatcgtagcgcaacgtattgttatcgcaacgggttctcgtccgagctggcctgcaccctggaacgatttgggcgatcgccttatcgtgaacgacgatgtattcagctgggatgacttacctgaatccgtcgccgtgttcggccctggcgtgattggcctcgaattaggccaagccctacaccgcttgggcgtaaaagtaaaaatgtttggcgtgggtggagccgttggcccgctaactgatagcgtagtacgcgaatacgccgccaacacgctaggcgatgagttctatctcgatcctgatgtaaaagtcgaattgattcagcgagaaggcgataaagtctttattcgctatcaaaatctggatggagaaatgcaggaaatcatggtggactacgtattggccgccaccggtcgccgtccgaacgtcgataaattagggctggaaaataccggtctggagctagatgagcgcggtgtacctaaagccgaccgattaaccatgcaaaccagcgtaccgcatatttttatcgccggcgatgccagtaatcagcttcctttattacatgaagccagcgatcaggcacgcattgccggtgcaaatgccggtagtttcccggaagtgttgcccggtttacgccgaagcccgatttccgtcgtattttccgatccgcaaatcgcaatggtaggttcgactttccgtcaattgagccagaaattcagcgtctgcggctgttttgaaatcggtgaagtttctttcgagaatcaggggcgttcacgagttatgctgcgtaataaaggcatactgcgggtttacggcgagcagggtacagggcgcttcctcggagccgaaatgataggaccaagcgctgagcatattgctcacttgctggcttgggcacatcagcagcaaatgaccatcgaccagatgctggatatgccgttctatcacccggtgattgaagagggtttacgtaccgcactgcgtgacctgcaatccaagctgaaacttggaaccgacgaggcagaacgctgcctacgttgtccgggcgagtaattcgcctctctattacctttctctcagcaaaaaccggggtcttgcccggtttttgctttctacattctttttctccgcgccgaatttaaattatttctgcgggacgcctccctgaaaagctccgccctgattgccccgctgcaaaaaattccccactgtacttttctcaccgcgaataacagagatgtacttgaaacagtattaacagtactgcattggaattggaggcgtaatgaaaggcatggaaagccggattgctcgtatcaaagcgaacccatcgggagtgaagttcagtgaactggcaaaaatttgcagttattacttaggaccacctcgacacaactcaggcaatcatcatgtctacagcatgccttggcaaggcgacccacgaattaacattcaactcggcaataacggaatgtcgaagttttatcaagtgaaacaagtaattacatctctaggaaagttagaggagatgatccatggttaatattgaacactacacctaccgcattacctggtcggcagaggacgcggaatttattggtttatgcgccgaattccccagcgtgtcatggttagcgcctaccagagtacaggcgctggatggaataacggtagtagtggcagatattctggccaaaatggttcgctccggtgaaacaccgccgataccgttatcagagaagcacttcagcgggaaattagtgctgcgtatgcctcccgaccaacatcggcgtttagccatcaatgcgacaggagaagggattagcttaaatcgttatttatgctcacgtttggcctgttagtcacagaaatcgtctcgttagagtctgctcgccaatgggcttgctgtgtgcaacaaaactaaccgactgagcttgtattcgcaaagctggaaactcgtttaggcagttggtgaatgcgtgatgagcgccgaaagtacatatttatctggcggcttcggctctctgttttatctcgaaatctaccggcagcgagataatcacctgcccaccagataacaattcagtcggcggaaaaggtaggggctgggcacgttttaaaatagctaatgcctcacgatctaataaaagagtgccgctgctactggtcaaagtagcggatagcactcgccctttgctatcaacgataaatttaacgatcgcggtgccctgccgcttttgctttctggctccgggagggtagcgcttgaagttagctaaatggctttgtaaaacgccagcccagtttgctcgtgcctgaacatgttgtaatgagtgactattattaggtgccgatacgcgctgggctgtccctgataacggcgaactcttgctcatcacagtcgacagtctttcattattttcttgatttataacggttttagatttaagcgcgttagccttttcacttggcttttttgctattttcggttttagtttcaaggcgggtaatacggaatcaagggaaggctcttctgccaaaaagttattattttcaatatgttgttctgtctgcgattcaccgacgggtaaagttggctcttgttcaacgcctacctgaattttttcaaggcttggtgcaaattctgcttccgctgacagcgttagcactacggcggacagggaatctggcggtaacggagaaacagatcgctctgccaaaaaccacagcccggtcaaatgcaacgcaaaagataacaacccgccgcaccacaaagatatcgccgaggagccacgacaaactgaagagtgagtattttccacggataaaatcatcacattcctttgttattcaattaatagcgtaactttcattaggtaagagcagccgtttactcttctgccaacgcggcatacagacgatcggccaagggtttcagtaaatagctcagtagtgaacgctctccggtgcgaataaaaatatcgacggacatacctgactggattttttctgtgtgagtttgctgtgcttcatccgtattgatcgacacagttaatggataatagggctgtaagctgcttgggttattcaatcggtcagcgcctatatgcagaacgcttccctgcaatcgaggagaatggctttggttgaaagcggaaaaaataagttctacaggtaaatctaccgcaactttatcgattaattcgatgggtagctgagcttcaatcaacagtgggcgcccgctaggaacaatttccatcagttgctgcccaaagccgataacgccccccacggtgtgctgtgccaaggcgataatgatgccgctttctggtgcataaatgcgcatattggccagatcatattccgctacgcgaatttgctgatctaaatcctgcaaccgtcgctgagttttagctaactgctcatgaatatctgcctgatattgctcaacctgctgtaataatcgttgctcattcgccttaatttgctgacaagtttcactaatatggccacggtgctgatccaccaaagccttcaatgcaatagcctggctttccatatcaagctggtgtttaagcgccacatagccgctttttgccagcgtacgcacaccttttaactgttgctgaattaaatcggactgaagttggttatttgctcgttgtctatgcaacccggcatggcgagcgcgtaaaagagctatttccgctgacaaacgcgctatttccgcttgttgagcctgatatcggtggtagaaaagttgctgttgtaaaaccatgagctcagcaatatggggcttctcacgctgcgttaataatgcgactggaaagcggatctccgcctcatgatttttctcagcaattaaacgcgcctctagcgagagtaaggaaaaatactgctgctgtagattatctcgctgactccgttccgttgtatcatccagcgaaatcagcaattgtcccttttctacccatttaccttcggcaatatgtagctgactgattcgcccgctttgcgaagactgaaccacctttctattttctgtgaccaccacaactccggcgacagcgacgcctttatctagtggcgcaaaaccggcccaaataaaaaaaccaataaaccaaatcaacaccagcagcccgccaatataaagatagcgtccgctattaatttgcagcggttcctgagcggtggcaaacggcatgatttcgcccctttccgtggcttttggattagtcaccttgtgatgttctcccggcgggaacaaaccgataattcgccacgttaccccagacattttttttatctgcttttcgcgtcgaagcgatattatctttggcgtaaaaactgctgagcactgccgcagtgcgatcaaacagctgctgttgcccgttttttagaagcaataaaaaatcactgccagacaataattcaggcttatgagtgatcataaccaccgtactaccctgccgttttagctgttcaatgctcgctaataacgccttttctccgccttcatctaggctggcattcggttcatccaacacaatcagccgcggcatcccgtacatagcccgcgccagcgcaattctctggctctgtcctccggacagtccttccccaccatcacccagctgagtgtcataaccctttggcaaatgtagaatcaaatcatgcacatccgccatctttgcagcagccacaatctgggatgaatccagcacgccaaaacgagcaatattttcagccaccgacccttggaataactgcacatcttgtggcagatagccgatgaattttcccagtaaggatttgttccaatgagaaatttctgctccatctagtcgtattgatccactgaatgctgtctgactagcaaccagtaacctcgccagcgtggatttaccgcttcctgatggccccaaaacgccaagaacctcccccggttgcagggtaaaattgacggaatgcaggataggaaccgaagtgccagctcggcaggcgagtaattgagtgacggttaactgacccagagggtcaggcaaaactatttctgtcgtcaatgaggattgctgattagccagcaaatcagttaaacgctgataagccagacgggcatggctccagtgtttccagactgcaatcaattgatcgatcggccccaatactcgcccgatcaatattgatcccgcaatcatcactccagccgtaatttctcctcgaataaccagcaatgatcctaatcccagcatcattgattgcagcgttaacttgctggacttggctaacgcactaatgcggctgcttctgtcactggcaatattttgcagataaaggaagcggcaatgctgagttagccatcgttcccgcaaagcttttagcatccccatcgccgcgatggtatcggcattacgtaaatgggcgtttgcctgcaaagttgcccgcgaagtgatttcagaggcctgttttaatggttttttacatgcccagtgattagtgcaagccagtagaatcagcacgcctgccccaatggttgccatcgctccaagccaagggtgcagcagataaatcaccaataaatagaagggaaaccagggcgcatcaaaaatggcaaacaacgcattgccggtggcgaactggcgtagcgtcgtcagatcgttaagtgcctgcgcggcctgaattttgttaccttgcaaaattgattggaaggtcgagttaaacacctgctgattcaactgcatatcggctctggtgcctaaacgaataacgacggctcctctcacccattctaataagccaatcaaagcaaaagcgcccaaaactaataaagtcagcatcagtaacgtcatggtgtttgctgaggccaagacgcgctcgtagacctgtaacatatatattgcgggagccaacatcagcaaattgataattgcggtgaatatccctattccccatagactggttttatcacagattaaaaccgctaaaatcggaggtaaggtcgtttgagaggtattagctaatggcatgggtccgtttccacactgtaatcacacttttaattcgcaccgcagctaccattccaaaagagcagtacaactcgtaaaaatgcttgaacaatgtatatcaaaatcaccaccgcaccttatttccctattggcacggcggtgacattttcattcagtcaaaggggtatttcccagcagcgctttatcaggcggctaacaacatttcgttgtactctgccacaccaattgcttcgataaatggtgcgtcatctatcacgtcgccagaattatactggctagctatagataacgtgttgaaggcgctgtcaacatccaccccactcgttttgagaatttccagcatcggatcagggtctcctttcattaaaccgtataacgttttgtgcaaatcgctctgatgattttgttcctcagtgagcgcaggatcatattgcccagtgatagccagaccactaaaggtgacctccgtttttacgatgtgtcttcccccgccgacgctaggttctagcccttcaccaaactgcacctcatcaatattgccatggagcgtatgctgaggataaaaggtgtaatgtaagttacccttcgctatcaggctggtttccgtattatgcgaactgccaatagtaaattgatggccattaaaaccatccgatcccccgtaaaattgcccacgatctttaaccggagccagttcgatattaccgaaccccgcagcccacgcttttaggtaagatgaaacactaaattcggcaaattcttcttggtatttaattgttatactcataaataatttccttttagtaaatgggatataacttagaatatgattattaatataaccatacataccaacaggggttaattaacacacctgaagactttaaaatttgtattcaaatccaccctgaatagttcggccacggctagcagaaaatgacagtgaatcgccataattaaccagataagcacgattactgatattttctattgaagtacgtaatatcaaattatttgttattttatagctggcatataaatcaaacactatgtatttcggccagtcagcgacataagccgtacctggatagccataaccattaagcactgataaatcttgatacccacggttataacggattacggtaccaaaatctaacagtttatttaatgctcttccccccaacgttaaactgccacgatcgcccggtaaataagctgatgatccgaataccgccccatgtctacagagaatgaaatcattaagatggttaccatcgacaccatacattcctatcccttttgtatttttaaccgattgaataccgcccaaccaggctggttttgagcaagtatcgttatgacctatcattcgggtataattcagactggtataaaaaaaaccggcatcgtaacttaattgatattccaatccgcgaaagcgacttttaagtaaattattaacgtaagcagcataggcaaatgattggcttccgcgcagaggtaatgctcgctctaattccaagttgatatagttcgtcacccgggtatcaaagtaggccatttttgcgccaaatttatcgccgctaatgaataaatcttcctgttgaatattcaacccagattcccaggtgcgggagcgctctatggccagattaggatttgggaacaaaaaacccgaaccgtgggcactgccggtagccagagtttctgttatacccggtggccgccatgattgaccgtagttgccaaaaaactccagccattgcactcctggcttcaccccaatgcccaaggttggcaatatttgctgctcatggcgatcaacatcccaggtcattgtcacagggacttttttacaggtatttctttttcccccgccatgttgggggttacatgggttttgccgtgtataaggcatttttgatgtgtatagccaggtatgcccttgtaatcgagaatgttcgaaacgcagcccgccatccagccgtaaccagtcatcgtagtggtaatcaaactgagtgaaaacgctagtcagactgcgctggccagacggagtcacaccctgcatgagatctttgttcgtgtggccgctggaacgatcgctaaaccaatccataccatattgaaggctcaataaatggttatccggcagcatgaaacgttgagtattttgtagctggagaccgcgcgtagttaaacgcgtgcgagtggtatatttccgacagaaaataggatcagaacacaaagtattggttttatcatcggtatcaacgtaataggcttttgccttggcatccaaccagggtagatgctcgggctgtaagctgtaatccaatccgaaattctgcgttatgacatcgctaatactgctggttttccagccgacgccgcttttattcggtgagttttttacacttaccagaaagccgccgttagggctgcttacctgagtttgcaggtaactggcaaccaaacgctgctccgcaggcaagttccagcccactttagccagtcgggtatgcatttggtagccggaattgagcactttcatgtgctttaactcatcaccgattgagtttttccccttatttccatatccaaaacgtagctcgcccagactaccgatgtttcccggccaataatcaccaaagttccgctcacttatggctatcaataaatctccggtttcatgaccaaatgccaatgttccgccacctataaatcgggtaccgttatcgcccgttgtggctcgcagattaccgccaagctcttttcctggctcaagaaaatccgccgcgtttatcgtattaaaagtagcaataccgccaattacgccggcgctaccgataccgctggtcggccctttttcaatcaccacattgctaagaatatccggatcaataaacatcacgccgttacgtccgccgtgaccacttttcataaagttttgccgcataccgtcaatattcatatttatacgaccaaaatcttgaataccgcgaatattgaccgataaagcaggatcttgttggtctacggcagaatagacgccggcagtttgctccaatatatcagccgcatggcgggcaggacggttatctaattgttctttagttatttcactaacagagcgaggttcatcatatatccaatcgtcagaatattgcagaccgccaccttctatttttagcggttctaataccacattattatcatctatctttgaagaggggatattaacatcaagctgttccgagtaacttttatcactaaataaataaaaaataaaaaaaagaatgatactgattaaaccattaggcttaattttattcacataattattatgcatatttttgcttcatccttggaaaaataatgcgacagccaacttagttatttcactaaatcaacagtttaaaaataaagtcttacattagcgctttatttatatttcaacaattgagaatgattatcataatcacttaatgaaataaactcaacttcctacaggaagaaataaagaaatagcgccaatgaatgacagtaaatgtgaatactcgccctaatgctaaaggaatgaatggttaattatcgcagatgaacccaatatattaattaaagggatgtttaattacgactgacagttagcctatagctaacatattcacagggaagggaatatttggcaataaagcggatggtaagcgtgccatccgcaatgcgtaaggaattaattaaaacaaacgctctttagcttcagcaatggctgatgccacctgcagtggcgatacgccgcccttggccacacgtttatccagacaggattgtaaagccagtattgggtacacgtcgtcgctaataatggcgctgaattttcgcaaatcctgcaacggcaacgcttccagtgctttaccctgacgaatggcttcaaccaccgcttcgccgacaatatgatgcgcttcacggaaaggcacgcctttcgctaccagataatccgccaattcggtcgcattcgcataaccctgctcggcagcttctttgcaacgcggacgtttcacctgaataccatccaataccagcgccgccatatgcaggcaatccagccaggtatccaatgcgtcaaacagcccttctttatcttcctgcatatctttgttgtaagccaaaggcaggcctttcaatgtcatcatcatcccggtcaatgcgccttgtacacggccacatttaccccgaatcagttccaacgcatccgggtttttcttctgcggcatcagggaagagcctgaagtgacgcggtcagataaatcgacaaaggccgcttcgccactgttgaagaaaatcaaatcttcggcaaaacgagagagatgaaccataccaatgctggcatttgacagtaattccagcacatggtcgcgatcggaaacactatccagactgttgcgggtcgcagaagcaaaacccagccaatcggccagctgttcgcgatcgatggcgtaagctgttcccgccagcgctccacagcccaatgggctcacgtccaaacgctttaaagtgtcttgcaaccgactttcatcacgagccagcatttcgctataagccaaacaccagtgagcaaaggtcaccggctgagcgcgttgcagatgggtataacccggcatgaccgcgtcctgattggcttccgcagtgataaccaacgcctgttgcagctggcgtaccgccgattgcagctccgtcacttggaatttgcaccatagttttaaatcggtagcgacctgatcgttacggctacgtccggtatgcagctttttacctaaatcgccgactttggcaatcagtttggtttctacccagctatgaatatcttccgcatcgctggtcagaatggcttgtggatcggcctgaacctcttccaataatacggtcaacgcctgttcgagttgtaattgctcttcggcgctcaacacgcctacggtaaccagcgcttttgaccaggcaacagagccgaaaatatcctgttctgccaatcggtaatcaaaccgcagagaatcgttaaattgcttaaaccgctgatctgctgcctgactgaaccgtccgccccacaatgccataacttgatttccttaaactgataaaccgataatcctgataaacgatgctaaaacagtgagatgcgagcgcaagcagagctgcactcgcaaaggtcaccgcattacttcttcgcgttcagcgcacgaatacgggaagacagcgagaacagacggataaagccgccggcgtggctgtgatcgtaaacttcatcttcaccgaaagtagcaaactcttcggaatacaggctgttagaagacgttttctgaattgcagtcacctgacctttatacagttttagaaccacttcaccgttaacttcctgcgccaatacttcggccgcagcctgcaaggattgacgcaatggggcgaaccaacggccatcgtaaaccacgtaggacatttccagacctaactgctcacgccatttaaagctatcgcgatccagcaccagttgctcaacgccacgcagcgcagccatcatgatggtgccccccggcgtttcgtaacagccacgggatttaatgccaaccagacggttttccacgatatcgatacggccaataccgtgtttagcgcccagcgtattcaatgcatccagacattggaacgggctcatcgctttgccattaaccgcaaccactttgcctttttcaacggcaacggtgaccagctcaggttcgtccggcgcgtcttctggcgctacggtccaaacccagcaatctttgtttgaagcattagccgggctttccaacacgccgccttcagtagagatatgccacgcattctcgtcacggctatagattttttccaaggatgccgtagtcggaatatcacgctctttcaggtaatccagcagcgcttcacgggaacgcagatcccactcacgccaaggcgcaaccactttcagttgtggcgccagcgcggtataggtgctttcgaaacgcacctgatcgttacctttaccggtcgcaccgtgggctaccgcatcagcacccagtttcaacgctagctcaacctgcgctttagcaattaacggacgcgccattgaagtgcccagcaggtaagtaccttcgtacagagcgcccgtttgcagcactggatacacgtaatctttgataaattcttcacgcaggtcagccacatagcaggctgaggcacccgttcgcagcgctttttgttcaatcccttccagatcggcacgttcctgcccgatatccgcaacgaaggcgatcacttcgcagttatcatagttttctttcagccatggaatgattgccgaagtatctaagccgccggaataagccagaacaattttgctgatgcctttagtttgcattttcatttccttgaatctcaattcagataaaacaatagaagaagaatctgtaatcaccggagcgacgaggctcaggccagaatacgtgtacctatcggtaccccgttaaacagagcaggaagctggtcagcatgacgccagctggcaatatccaccggacgccccagtgaacgggctgcatccaacgccgcgttcactttcaccaccataccatcagtaataatgccctgagcaatcagttgctctgctttttgcgccgtcatttcggcaatgcgttgccctttgccatccagaatgccgctaacatcagacaacaggattaaatccgcgcctaaggttgccgccagcgcggttgccgcctgatccgcattcacattcattagctcgccagaggcggtaatgccgatagaactaatgatcggcatgtagttagcagccagtagggtttgtactaacgtcggtgaacccggttgagcacctccaacgtgacccaactccgcatctagcggcgttactgtgaccgtattaccatcgcccaaacacaggccaacggcggcgatatgatgtttcaccgcccaggctaacagggttttattggcagtccccgccagtgcaccggtgatgatgtcgatctggtcggccggcgtcacccgcaggccatttttcttcacgacaggcagagccagttttttcatcaagtcgtctaccagacagccgccgccatgcataatgaccagcggacgctgatgcttttcgcggtagatcaccaaggcattaaacaggcgctccaacgcctcttcgctgtccaataacaccccacctaatttaatgactaacggattcatcatggtctgcgcctcaattgcgtcttgaaaatataggggtgagcgagaatacgttgcgggagaatttcgctaccgtccctgattaaagcaaagcctgagtttccgggaaaccaaagcgtatattcatgcactgaacagcctgagctgccgcgcctttcagtaagttatcttccgtcgcgaccacaatcagatgttcgccctgaaccgaaaagccgatatcgcaaaacggtaacccaaccacggctttcagtgcgggaacgccctgctgatacaaacgcaccagaggtttatcctgataggcgttgtgataggcctcggcgatatcctgtgcggtgacgccagcgtttaggcgacaggtaatggtagccagaatgccgcgggcaaaattccccagatgcggagtgaaaatgaccggcgtacccaaatgagccacaatttcaggctgatgacgatgagtaaacaagccgtaaggctgcaaactgacttcgcagaagctgttgccgacgctggctttacgccccgcgccgctcacgccgcttactgcattaatcactggccactgttcctgatttagcaaaccgttttctaccagaggctttaacgccaactgggatgccgtgggataacaacccggcacggcaatcaactgagcttgtttaattttatccgcctgccattccgccaggccgtaaactgcctgctccagccattcggcatgctgatgttcaaaaccgtaataagtggtataaaaatcagggtcctgtacgcgatacgcaccggacaaatcgaatactacgcagcccgccgctagaaattgcggagccaaatcgtggctaacttcatgagcggttgccagaaacaccacatccacgtttttcgcagcttgagccacatcaaccaagggttgcagcggtaaatcgatgatgccttttaactgcgggtgcagatcggaaagcaattttcctgcatctgcactttgcgctgaaaccgttaaaccggttatgttcatatgtgggtgacgattcaggtaagccgtaagttcagctccggcataaccgctggcaccaacaatcagcgtattcaacatggattcagttcaccttctgactaactgtacataagtacgcaaaacgagttgcagggtttatcagcaagtttttactgtttccctacgcgattgagcattgacattttcgtaaattcaagggcgtttctggttcccttacgctcatgcttgctgtattttcattcaaatagttattcacaataactgcatgaatattgatactaccctaaccaaaggctgtcaacagtgaagatgaaattacctccatttattgagctgtaccgggcgttaatcgcaacgccctctattagcgcaaccgatagcgctctggatcaaagtaatgaagcgttaatcaacttgttggccgaatggtttagcgaactaggttttcgcgtggaaatccaaccagtgccggaatcccgcaacaaattcaacctgctggccagcattggtgaaggcagcggcgggctgctgctggcgggtcataccgatacagtaccttacgatgaaggccgctggacgcgcgatccgttcactttgagcgaacatgacaacaagctgtacggtttaggtactgcggatatgaaaggcttctttgcctttattctggatgcggtgcgcgatatcgacgccagtaaactgaccaaaccgctgtatattctggctaccgcggatgaagaaacgactatggccggagcgcgttattttgcggcttccacccaactacgccccgattttgccattatcggcgagccaacctcgctgaaaccggtgcgtgcccataaaggccatatttctagcgctattcgcatcgtgggtcagtccggtcactccagcgatccggcgcgcggcgtcaacgccatagatctgatgcatgaatccatcacccatttgatggcgctacgcaacacattgcaggagcgttacaacaatccggccttcaatattccctatcccaccatgaactttggccacatctccggcggtgacgcggcaaaccgtatttgtgcctgctgtgaattacatatggatattcgcccgctaccggggctgacgttgagcgatttaagcgaattgatgaatgaagcgctggcaccggtgagccaacgctggccgggtcgcttgaccatcgacgagctacacccgccgattccgggttacgaatgcccaaccgatcacgctatggtggcggtgattgagaaactgctgggcagccgtaccgaggtggtgaattactgcaccgaagcaccgtttattcagcaggtatgccctacactggtgcttggccctggctcgattaatcaggcacatcagccagatgaatatatagacaccgcttttattgaaccgacccgcgagctgatttcccagttggtcgatcacttctgccagcagtaagcaagctacccgaacgcatgtgttatcgggtaagcacgtgttatcagataaaaaagtggatgggagatcgctacccatccacagatagcccatttcgatcaatatcgatgattagccagactgataacctgcgaccagtaattaaatttcagaaatacccccaattttgatgtttttttgctaaaaatagtgtcaattgggttattggaattgaacgcggcgagattcgtaatcagtctcagcctcttgggtgaaattaatttacaaaaagaaaccataaaaggttatacctctaattatgagggttataggcaagcggccaacaaacgcatccgatgagcttactctggtcagccattcacatgagcgagcgtaaccaacatgtctgtaacctcaaatacgcagggtatatatgggtcaggggtcatatgaacgaacaatattccgcaatgcgaagtaacgtcagtatgctcggcacactactcggagacacaattaaggaagcgctgggcgagcacatccttgaccgggtagaaaccattcgtaagttatctaaatcttcgcgagccggtaatgaagcgcaccgtcaggagctgctttcgacgctgcaaaacctttctaacgacgagttattgcccgtcgctcgtgcgtttagccagtttcttaatctgacgaacaccgctgagcaataccacagcatttcgccgcatggtgaagcggcaagtaatccagaagccttggcccagctgtttaatcgtctgaaagataagaatctaagcaataaggatatgtgcaaagcggtggatgaactgtccatcgaactagttcttactgcgcatccaaccgaaattacccgccgtactctgattcataaactggttgaagtgaatacttgcctgagccagttggatcacaatgatttagccgattacgaacgcaacaagatcatgcgtcgtttgcggcagttagttgcacaatcttggcataccgacgaaattcgcaaactgcgaccgtcacctatcgacgaggccaaatggggttttgccgttgttgaaaacagtctgtgggaaggggttccggctttcctgcgtgaattcaatgagcagttggaaaattctctcgattaccgactgccggtagaagcggtgccgattcgctttacctcgtggatgggcggcgaccgcgacggcaacccgaacgttaccgccgaagtcacccgccacgttctgctactcagccgctggaaagcgaccgatctgttcttgcgcgatattcaggtgctggtttccgaactgtcgatgtcggaatgtacaccggaactacgcaaactggccggtggcaaagaggtgctggaaccttatcgcgaattgatgaaacgaattcgtacccagctaatcaacacccaaacttatctggaaggccgcctgaaaggcgatcgcgtattacctccggaagatctgttgatcagcaatgaacaactgtgggaaccgttgtatgccagctatcaatcgctaaaagcctgtgggatggaaattatcgccaacggccagttgctggatacgctgcgccgcgtgcgctgcttcggcgtgccgctggtgcgtatcgacgttcgtcaagaaagtacccgtcacaccgatgctattgccgaactgactcgctatttgggtctgggtgattatgaaagctggtcagaatcagataaacaagcgttcctgattcgcgaacttaactccaagcgcccgctggtaccattaaagtgggagcccagcgccgagactcaggaagtgctggaaacctgccgggttatcgccgaagcgccggaaggctccatcgccgcttacgtgatttccatggcgaaagtcccttctgacgtactggccgtgcatttactgctcaaagaagccggttgtccattcactctgcccgttgcgccgctgtttgaaactctcgacgatctgaataacgccgatgacgtgatgaaacagttgctaagcattgactggtatcgcggcctgattcagggcaaacagatggttatgatcggttattccgattcagccaaagacgcgggtgtcatggccgcttcgtgggcgcagtatcgtgctcaggatgccttaattaaaacctgtgagaaagccggtgtcgctttgacgctgttccacggtcgcggcggttctatcggtcgcggtggcgcacctgctcatgcggcgctgctctcccagcctccgggtagcctgaaaggtggcctgcgcgtcaccgagcaaggcgaaatgattcgctttaaattcggtttacctgaagtcactatcagcagtctggcgctgtacgccggggcgattctggaagccaatctattgccaccgccggaaccgaagaaagagtgggtcgaagtcatggatctactgtctgaggcatcctgtgatatgtatcgcggctatattcgtgaaaatcctgactttgtgccttatttccgtgcggcaacgccggaactggaattgggcaaattgccgttgggttctcgcccggcgaaacgccgcccgaacggtggtgtggaaagtctgcgcgctattccgtggattttcgcctggacgcaaaaccgcctgatgctgcccgcttggctgggtgccggggccggtttgcaaaaagccattgatgcaggaaaacaggatgagctggcaaccatgtgccgcgattggccattcttctccactcgcatcggcatgctggaaatggtcttcgctaaagccgatctgtggctggctgaatattacgatcagcgtttggtcgacaaaaagctctggccgttaggtaagcaattgcgcgatcagctcgccgccgatattaaagtggtgttaaccatcgccaatgacgatcatttgatggccgatctaccgtggattgccgaatctatcgcgttacgcaacgtttataccgatccattgaacgtgcttcaggcggaattactgcaccgttcccgtcagcaggaacatccggatgcccgcgttgaacaggcgttgatggtgactattgctggcgtcgccgcaggtatgcgtaataccggctagtttctgatgggggagcaatcccccaaatgatgaaatcgcaaaatcgttattgtaaggacgacaaaggggctaattagccccttttgcatattgaaatctataatgtcgacaataagttaaggcctaacacccaaagtatggcaaatggcgtagctcatttctgcccgattcagggtatagaaatggaaatcctttactccttcgcggctcagaattttcaccatatccatagcgatagaagcgcccagcattttgcgcgtctcagggtcgttatccagcccttcaaatacgctggtcatccaatgaggaacgcgcacgttggtcatggtggcaaagcgctgtagctgcttaaagttggataccggcaaaattcccggcacgatttctacgtcaattcccgtcgccacacagcgatcgcgaaaacgcaggtaactttctacgtcgaagaaaaactgagtaatggcacggttagcaccggcatcaatcttacgcttaagattaatcaaatccgcctgagcgctcttagcctcaggatgtacttccggataagctgccacggaaatatcaaaatcgccgacgtctttcagcaaagcaaccagatcggttgcatacatttccggcttaccgctgccctccggcaaatcaccgcgtaacgccacaatatgacgaatgccattgcgccagtaatcctgcgcaatctcacgcagctcacccgccgaggcgtcaatgcaggtcaaatgcggtgcagcatccagaccggtacgctctttaatgtctttaataatgctgtgagtacggtcgcgctcaccggagttagccccgtaagtcactgaaacaaacttaggtttcagtgtgcttaaacggtcaatcgagctccacagggtgtcttccatctcgctggtacgcggcgggaaaaactcgaaagagacgttaatctgaccctgcaactctgccagactctgattcagcgcttcccgctggtttgcgtgaaaaaaactcataccctgtctacctcgtcacccatcgttatcgatatcgcggtttagtttctccgcatttaccattctaagcgtccatacgtttagacgtctagatagaaaatgaccgatcttatcgctggagtcaacgcttatattagtttagcccgatgattaatcttcactcagtacacgcaggaaattcatgtgtataaaaacgggcaaacatgctcgaaatgagccgcggtagacaggggaaataacagaatattgatatgaataacaggccgctagccagatagaaactctgaatagcgacctgccagaagtacgattacaacagctgagacaaacggttcaaatcggactggatagcgccggcggttacgtctcgccccgctcccggcccgcgaatcactaatgggttatcacgataccaacgactttcaatggcaaacacattatcgcatggcaataacgaggccagcggatgttcaggacgaacggcttccacgccaacccgcgctttaccattggcatcaaaacgcgcgacgtaacgtaataccagccccatttcgttggccgcctccagacgctgaatcatttgctgatttaacgcttcgccattttcgaagaattgatcgacagaacctgtctcagtacccgcaggcaccagggactcgacccgcacttgattaggttcgatgtcgtaacccgcttcgcgagccagaatcaccagtttgcgcatgacatcctgtccggaaagatcgacgcgcggatcgggttcggttaatccttgctgccacgcctgatccaccagctcggtgaaaggtactgtgccgtcaaactgtaggaacaaccaggataaagtaccggagaaaatgccgctaattgccagaatgctgtcaccgctgtcgcgcagatcccgcaccgtatggttgaccggcaaaccggcacccacggtggcgttgtacaaccaatggcgacccgttttggcgaaagcatcgcgaatctgtcgataagtattgctgctggatgcgcccgccagcttattggcgctaatcacgtggaaaccatagctggcaaagtccagatattgctccgccagcgactgactggccgtgacatccaataccaccaaatcatcgaatggatgcgcacgcatccacaggaaaagtgattcttcatcctgctctttggcttcatcatcgtagaaagccaaggtgcggctggcgtccagcccgtcgtaactcagcaagctgcggcggctatcaaccacacctgccagtacaaattcgaatccgctgcgagccgaaatgtttttttgttcgcgggcaaagagctccagccagcgagcaccaatattacctttgccgaacagcatcagcccgatacgtttttccgcccggaacagagtctggtgtaggccttgaatcaaatgttgggtcggccccagacgcagtaccgcaacgatgctgataccgtcttcggcctgccagataaactcaaccggctgatctttaagctgttgatagaaacgatggctgtgcaacggattcttgcaaacgcctgcgcctactaatgccaccagtgccaagccttcccgtagcgataatttccccggcagcgtggcatcttccaacacccgcagggcgctattgacgacttcagaggtatagcaaagctgcaataggttacgatcgggatgaatccccgtcgctaacggtttgatttgtgagcgtttcagcagcaggtctatctctttttgcgccagcgagaaatcgtggtgacgggctatctgcaattcaatcaggcagacatcatcatgactggtcactatttttgcaccggtgcctgatgccagcacgcgttcgatgcgagtagagccttgctccggctggtagctacagcgcagctgcaaatcgatatcactgccagaaaccggctgcaaagtacgcgtatgcaataccggcgcagccagacgcgccagctcgctagcttcatccaaacgcagcaacggcaacaaacaggcatctttaactttgcgcggatcggcgctatatacgccagcgacgtcactccagatggttacccgctcggcggcggccaatgccccaacctgagttgccgaatagtcactgccattacgaccaagcagtacggtttcacctgcatcgttacgcgagataaaaccggtgaccactaaacgttgatgaggatgttgcgccaatagctgttgcagcagcggataagatcgcccttcgtcgatctgtggctgtgctgcccgctctgcccgcaggaagctgcgcgcatccagccaggtggcatccatatcctgcttttgcagtaccgccgccatcaggcgcgctgaccagatttctccatggccaaccacttcggcataaatagcatcgtcaacgcggttatccaataatccagccagacgctccagatcctgaataaaggctgcaatcaacggctcggcggcctccggtggcaataatccattaatcaaatcctgctgatagcggcgcagcgcttgctgcacctgatgcgcagacaaacgatcgctttggcttagttttagccagtttatcaattggttggtcgtactgcctgcggcagataccaccattaaatcacccggtttactgtagttggccataatttcggccactcgcaggtaacacttcacgtcagcaaggctgctaccaccaaatttatgcagttgacgcccagtgaccgcccctgctatcgctattgcattcatgcttacctcgttaccgccaaccggaaggcattttccagatcggcaatcaaatcttcgctgtcttcaatacccacggaaatgcgtaacaagctgtcggtgatacccgcagcagtccttgcttccgccgccatacccgcgtgagtcatggtagcggcatgggaaatcaggctttccacgccgcctaatgactctgccaatgtgaataattccaaagcagaaaggaagcggcgcagcacctgttcatctccatccagttcaaaactgagcatcgcaccgaagccagactgttggcgacaggcaatttcgtggccgggatgttgtggcagagaaggatgatacagcttttttactaaaggctgctgttgtaaataaccaacaatgtcatccgcgttgcgctgctgttgagccattcgcggtgaaagcgttcgcaggccacgtaataacaaatagctgtcgaaagccgcgccggtcacgccaatattattcgcccaccacgccagctctaccgccagcgctgggtctttggcaatcaccgcgccggcaaccacgtccgagtgaccgttgagatatttggtgcaggaatggatcaccaaatcggcacccagcgccagcggttgctgcaataccgggctgaggaaggtattatccaccacggtcagcgcgcccacggcctgcgccgcctggcagatggctgcaatatctaccacccgcaataatgggttgcttggggtctcaatcagtaccagcttgggtttttccgccagcgcacgttttaacgccgcttcatccccttgatcgacaaacagcacccgataggcaccgcgcttactcagactatcaaacagacgatagctaccgccgtagcagtcatggggcgcaaccagtaaatcacccggctgcaatagcgtagtgcaaaccaaatgaatcgcagacataccggagctggtcattaccgctcccgcaccgccttccagctcagccagagcacgttgtaccacgtcgcgcgtcgggttgccgcgtcgggaataatcgtgcgttctgggctgattaaaatcgataaagttataggtactggagaggtgaatcggcggaacaacacagccatattgctcgtcatcattcaacccgctacggactgctattgttgcctgtttacgtgtcatattggtttctgcctgccgggacgctaaaaatgttacgtcagattagacgcacaaagaatggacgtcaatacatctggacatctaaacttctttgcgtatagattgagcaatggaataatacccgctaaaattatagcggctttaagtatcattatgatgtcacgctgatttcagctatgccccgtgcaacaatcagggtattaagcaacaggttgagtctattaatcacgggcaaattgcgtcctttcagtgactctggtcgagtaaaaccgacatttatttagtgagaacacggaagatcgggcataattggccggttttcagaattttgtatttttccgacaaatttaaggtgtcccatggctgagtggaacggcgagtatgtcagcccttacgctgaacacggcaagaagagcgaacaagtcaaaaaaattacggtatccattcctctgaaggtattaaaaatcctcaccgatgagcggacccgacgccaggtgaataacctgcgccatgcgaccaacagtgaattactgtgcgaagcatttctgcatgcctttaccgggcagccgttgccgaatgatgaagatctgcgtaaagaacgcagtgatgaaattcctgaagcagcgaagattattatgcgtgagctgggtgttgatcccgacacttgggaatattgatttcgcagtaatacccaaaacagcgggtaacatgctatcgagacaatctatcgacctatcgactcgacgaagtcgccttctgtccacagtaggcggctttatcctacgtcaggacatgatttatatggaatgactgattggcagacctgaatcctgcgatatacacagtatttaggcagattgatgatgattgagaagcagaaatgaaaaaaggcgctaaaagcgcctttttcgtctgacgggcagagattacttcttggcacccggcacgctgaaacgcttgttgaagcggtcaacacggccaccggtagcaacgtcacgctgcttgccagtgtagaacggatggcattcaccacacacgtccagattcaggtcatgaccaacagtagagttgatcttgattacgttaccgcaagaacaagatgcagtaaccaattcgtatttagggtggatacctttttgcatgggaaacctctaatttaggccgtgtcgctatccagccctgttccgccagacaccacacgtagttaataataggatttgatatcggattatatcaaaggcggcgaatcatacagaatttgagcagccctcgcaatcgaatccgcacattgtgaatcacacagtgtaaactgttcaatctttttttatccaggatggtgtcatgtccgttgttcaagttgcattgccggtaccgcttgcacgctcattcgactaccgcttaggcagtaatatgagcagcccggcgatcggcgggcgcgttagcgtcaccttcggcaaacgcaaagctatcggaatcgtggtgggtcttagcgaaaccagcgatttccctcttgagcagctcaaacctattgaagaagttctggatcaggaaagtttattcccaccaagcctgtggcgtattttgcgctgggctgcggattattatcactatcccattggagaagtgctgtttcacgccctgccaatattgctacgacaggggaaaccggctcaatccgcaccgctttggcaatggtttgcaaccgaacaaggccgggctacgccgccggaaagcctgaagcgcgcccctaagcaacagcaggctctggccgcgctactacaaaaacctgtttatcgtcatcaggttaatgaactcgccctgacagaaagcgccttgcaggcgttacgctccaaaggattaatcgacctccgggcgcaggaaccggcaaccaccgactggcgtactcatttcgaagtgctgggcgaccggctgcgcctcaataccgagcaggccaccgccgtgggtgcgattcgcagcgaagatactcagtttgccgcctggctgctggctggcgtcaccggttcaggtaaaaccgaagtttacctgagcgtactggaaaatattctggcgcaagggcgtcaagcattgattctggtgccagagattggcctgacgccgcaaaccatcgccagattccgcgaacgctttaatgcaccggtggaagtcctgcattccggcttgaacgatagcgaacgtttatcggtttggctgcgggcgcgtaacggcgaagcggccatcgttatcggcacgcgttctgcgctgtttacgccgttttctcgccttggcgtcattattatcgatgaagagcacgacagttcctataagcaacaggacggctggcgctatcatgcgcgggatttagccgtgtttcgcgctcgcgaagaaaatattcccattgtgatggggtctgccacgcccgcgctagaaaccctgcataacgtgcaactgggtaagtatcgtcagttaaccctgactaagcgtgccgggaatgccaaaccggcggcgcagcatttactggatttaaagggtctgccgctcaaagtgggcctatcccagccgttattacagcgcatgaaagatcatcttaaagctgataatcaggtaattctgtttcttaaccgccgcggttatgctccagcgttgctgtgccacgaatgcggttggatcgccgaatgccagcgttgcgatcactattacactttgcatcagaatcagcgccagctgcggtgtcaccattgtgacagccagcgtccggtgcctcatcagtgccctcactgcggctctacccatatggtttccgttggcgtaggaaccgaacagttggaaaatgagttggcaccgctgttcccagatgtaccgatcacccgaatcgaccgcgataccactagccgtaaaggctcattggaacaggctttggccgaggtacatcagggtggcgcgcgcattctgatcggtacgcaaatgctggctaagggtcaccattttcccgatgtcacactggtggcattacttgatgtggacggcgcgctgttctccgccgatttccgctcagccgaacgttttgctcaactgtatacgcaggtttctggccgagccggacgagcaggcaaaaaaggcgaagtgatcctgcaaacccatcatccggagcaccccttgctgcaaaccctgctgcaacgcggctacgatgattttgccaaacaggctctggcagagcgccaaagcgtttttctgccgccttacaccagccatattattgtacgcagcgaagatcacgataatcgacagtcagcgctattcctgcaacagctacgcaatctgctggaagccagtccgatgaaagatgatgctctgtggatcatggggccagtaccggcgctacaggccaaacgcggtgggcgtttccgctggcaactcctgctccagcatccatcccgtcagtttctacaaaaattgataaaaagcagccaaccgctaatcaacactttgcctcaggcaaggaaagttaagtggactttagacgtcgatcccatagacagttagtctttagcttgttaattaatagatacaggtagggttacaaggcaaacgtttacggtgtgatctgcgaggcatatcgaaaaaaactacttatgtcacatttttcatgcaaattaggtaacaaattgacctcactatctgtatagaatgacgtaaggcattaattttaccgagaccactcggcttggaacgaacatcacctcgccgatcgggaatcccattcgcgtgcgataaaacattaatattccgtgctattggtaacaaactatctcaaagcgttggtgctggctcggagccagagcaaggagaaaggcgttggaacataagaaagaattcagtatggcgaccatgaaagacgttgctgaaatggccggtgtttcaaccgcgacggtttctcgggcattaatgaatccggaaaaagtctcgaccatgacgcgacaaaaagtagagcaagccgtcctcgccgtgggttattccccccatgccttatcccgaaatatcaaacgcaacgagtcgcgtactattctggtcattgtgccggacatcagcgatcccttttttgccgacattgttcagggtattgagcaaaccgccgcccaacaaggctatttggtgttaattggcgactgcgcgcagcaaacccagcaggaacgcactttcgtcaatttgattattaccaaacagattgatgggatgctgttactcggttccaacctgccgtttgatgccagtaaagaagaacaacgcaaccttccaccgatggtgatggctaacgaattcgcgccagagctggagctgccgacggttcatatcgataacttaaccgccgcttttgaagccgtacattatctgcatcagttgggtcatacgcgcattgccaccatcgccgggccagagacaatgccgctgagccattatcgcttacagggttacgtacaagcgctgcgccgtaatgggattgccattgagcaaacttatattttgcggggcaatttcagctatgaagccggtgcagaagcctttgccgaactgatgtcactgccgaaaccgccaacggcgattttctgccacaacgacgtcatggcgatcggcgctatctggcaagcgaagaagatggggattcgtattcccgaagatgtatcactggttggttttgacgatctcaaactgtcgcaatactgcgatccgccattgaccacggtagcgcaacctcgctaccaaattggtcagcaagccatgttactattactggaacagctacaagggaataacgttcaaagcggttctcgactgttagatagcgaattaatcattcgaaacagtacctgtaagcctaaaagctaggcaaatattatagggttaagtaacatgactgacttactccaacatcaaaacgcagcgaaacgatagtggcacaaagagattatgtaagccgagggcgctcaggagcgcggcgcaagagcaccagcaagaagaaaagcagtgctccaagaatatcgaaaaccctggtggcgctagccggcgccttgttggtggtattcgttggtggcctctatttcattactcataacaaaccgggtgaactcccgctgttacccagccatgatccgcgcacgggcaatggattaccgcctaagccggaagaacgctggcggtatatcaaagaactagaaaatcgtcagattggtgtaacgacgccaaccgaaccttctgctggcggcggcatcgatgcaaaaacccagttaaccaacgaacagcgccaattattagaacaaatgcaggccgatatgcggcaacaaccgacacaactgtcggaagtgccttataacgatgccactcaggttcctcgttctcaggtaacaatcaagccgccagtgaatgttcagccacagattcagcaaccggttagccaaccgcgccaaaccgcgccggtaacagcgccatcagcgcagcagcggatgttgccgtctaatccggctccggttactccggcggtaacgccaccgaagccggaaaaagagaaggaaaaagaaaaaacccagcgctggatgttgcagtgtggttccttcaaagcaatggatcaggccgaatcagtgcgcgcgcagctggcatttgaaggtattgagagccggattactaccggtggcggttggaatcgcgtggttctggggccttatagcacccgccctgcggcagataaaatgcagcaacgattgaaaggcgcaggtgtatccagctgtattcccctctctattgggggttgaaaagtatcaatccccccccatttataatctcaatatgcctcgcgttgtgttgaacgatacaacgcgggggctcattccgtctgcaacgagggttcgctcgtgacaacaattgtaagtgtacgccgaaatggccatgtagtaattggtggtgatggtcaggtcactctgggcaataccgtgatgaaagggaacgctaaaaaagttcgccgcctatataacaataaggtcattgccggttttgcaggtggcaccgctgacgctttcactttatttgaactctttgagcgcaaactggaaatgcatcagggtcatttgaccaaggccgccgttgagttagccaaagactggcgaaccgaccgcatgctgcgcaaactcgaagcgctgctggcagtcgcggatgaaaccgcttcgcttatcatcaccggtaacggtgacgtcgtgcagccagaagatgatttgatcgctatcggctccggtgggccatacgctcaatccgccgcgcgcgcgctgctggaaaacacagaattaggtgctcgggatatcgttgagaaatcactgagtattgcgggggatatttgtatctataccaaccgcttccaaactattgaagaattaacttacaaggcgtaaggatagaatatatgtctgagatgaccccacgcgaaatcgtcagtgagcttgatagctacatcattggccaggacaaagctaagcgcgcagtggcgatcgccctgcgtaaccgctggcgtcgtatgcagcttaacgaagagctgcgccatgaagtgaccccgaaaaacattctgatgatcggcccaaccggcgtcggtaaaaccgaaattgcccgccgtcttgcaaaactggcgaacgcgccgtttatcaaagttgaagccactaaattcaccgaagttggctatgttggtaaagaagtggactctattatccgcgatctgaccgacgccgccgtgaaaatggtccgtcatcagtccattgaaaaaaaccgttaccgcgctgaagaactggcggaagaacgtattctggatgtgctgattccaccggctaaaaacaactggggccaggttgacgaatctcaggagccttccgctacccgtcaggcattccgcaaaaaactgcgtgaaggccagttggacgataaagaaatcgaaatcgatctggctgccgcaccgatgggcgttgaaatcatggcacctcctggtatggaagaaatgaccaaccagttgcaatccatgttccagaacattgctggtcagaaacaaaaaccgcgtaaaatcaaaatcaaagaagcattcaagctgttgattgaagaagaagcggccaaactggttaatccggaagagctgaaacagcaggctatcgatgccgttgaacagcacggtatcgtgttcgtggacgagatcgataaaatctgtaagcgcggcgaaacctccggcccggatgtctcccgcgaaggtgtgcagcgcgacctgttgccgctggttgaaggctgtaccgtttcgaccaagcacggcatggtgaaaaccgatcacattctgttcatcgcttcaggcgctttccaggttgccagcccgtcggatttgattcctgagcttcagggtcgtctgccaatccgcgtagagctacaggcactgaccaccgaagattttgaacgcattctgaccgagcctagcgcttccttgaccgagcaatacaaagcgctgatggcaaccgaaggcgttaccatcgattttactgcagaaggtattcgtcgcatcgcagaagccgcatggcaggttaatgagcgtaccgaaaatatcggtgcccgccgtctgcataccgttctggaacgtttgatggaagatatttccttcgatgccagcgaaagtaacggttcatccgtgactattgatgctgaatacgttgggaatcatctggatgagctcgtagcagatgaagatctgagtcgatttattctataatttggttctattagcgtccgctggatagataaaagtgggaggcttggcctcccctttttgtctctggctgacatggactcacacagaccgaagcgaattatgagctcatcaacttctaccagccaagctcaagcctggctagaaagcctgcggccacggactttaccactggcttttgcctctattgttaccggctccgccctggcttattggctcgacagttttaaacctgcggtagcgctactggccttgattactgccggtatgctgcaaattttatctaatctggccaatgactacggcgacgcggtgaaaggtagtgataccgaagaacgcatcgggccactgcgcggaatgcaaaaaggcatcataacccgcgagcagatgaagaaagcgctgattctcaccgttattctcaccattatttccggcgtagcgctgattgccgttgcctgtgaaaaaccgagcgatattctgggctttctggtactcggcttgatggcgattgtcgccgccatcacctacaccattggtagtaaaccttacggttatatgggtttgggggacatttcggtactaatgttcttcggctggctaagcgtggccggtacctattatctgcaatcgggccattttgacagtctggtgatgctaccggctaccgcctgcggtttattggccactgcggtgttaaacattaataatctgcgcgatatcgaaagcgatgcggccaacggcaaaaataccctcgccgtgcgtttgggcccacagcgcgcccgttattatcacgccgtattaatcaccgccgcgattgcctgtctggcgttgtttagcctgctttatctgcaccgctggaccggctggatctttgttctggctattccgctactggtaaaacacgcgatttatgtactgcgcgagccaaccgccgcaggcatgcgtccgatgctggaacatatggtaaaagctgcgctgctcaccaatatcctgtttgccgttggtctggtatttaactaacgcgcctttttctgccaattcccagaaaaccctgcggattggcagaatttaacaattgatgattttgccaacagtagccagaaagggatatactgactatcccagccgcaaccagacattaatcctatgaaatatgatacttccgaactctgtgacatctatcatgaagagataaatgtggtagaacctctgttctccaattttggcggacgtacttcatttggtggccaaatcacgaccgtaaaatgcttcgaagacaacgggttactctttgacctacttgaggagaacgggcgtggacgcgtgctggtcgttgacggaggtggttcagtgcgccgagcgctggtcaacgcagaattggctagcttggcggccgcgaatgaatgggaaggcattgtggtttacggtgccgtccgtcaggtagacgatctggccgaactggacattggcattcaggctatggctgctattccggtaggtgctgctagcgaaggcatcggcgaaagcgatattcgcgtgaacttcggcggcgtaactttcttctccggcgatcatctgtatgctgataatacagggattattctgtcggaagatccgctggatatcgaataacaccgactcggttataccaaacgaattctataagaaagggcgatataaatatcgcccttttgcttttgcgcttaatcggttgccagcgctatggatgccgagaataacctcagacctcttccattttacccagcagtgcgcgcagacgatcctgccatacgtgctgttcttgctttagctgctcattttcacgcactaacgcttcacggttacccgctgcgtcctgaacctcttgggacagggtgttgtttttttctttcagctcttcaatttccatctgcaacaaagtgatggtatcaatcgcctgctgaactttaccttccagtttctcaaatacttcaaatgacattctttagtcccctcatgatcgcaaggcgtacatctattggtagcggtcgcattttgaagatgcaaccactgcgaatatccatcgcgctatatattcatcgaactcggtaacaagcgctgtattttaacgcgcccccgtaaacagcggcgcagcttgattaaaacgattgtatgtagcctgtctccccctgtctagcgacataccggcacaaagcacagtctctcgcaatttacctagcgccactatcagcaaatgctgaaaacctgcggcctgttatcgcgtcatattttacatatttacaacaatggaaagtaaaagcactggtctgatcacactttcagaaagcactaacacccacgcgttacgcgaattcgctcatttttatgacaaggcacacagatttcgatttcgctatttctcgtttgtgctcgttaacgataaattcacataaaccccaaggatgaatttggggaaaaaacaataaataccctataactctctgtctgtaggacatcactatgagccaaacatcaagtccgaccctaaaaggccagtgcattgcggaatttcttggcaccgctttgctgatattttttggcgttggctgtgttgccgcattaaaattagccggtgcaagtttcggccaatgggaaatcagtattatctggggtctaggcgtcgccatggccatttatctaacggcagccatttcaggggcgcaccttaaccccgccgtcactatcgctctgtggctgtttgcctgttttgatcgcaaaaaagtccttccttatattgtggctcaggttgttggcgcattctgcggcgcggctctggtctacggcctgtactacggcctgtttgttgatttcgaacaaacccaccaagtggtacgcggcggtagcgaaagcctgaatctggcaggaattttctctacttacccaaatgcccacatcaccgttttccaagctttcctggttgaaaccgtgattaccgccattctgatgtgcctgattctggcgttgaccgacgacggtaacggcattccacgcggcccgctggctcccctgctgattggtatcctgattgcggttattggtgcttcgatggggccattgactggctttgcgttgaacccggctcgtgatttcggccctaaggtatttgcttatctggctggctggggcgatatcgccttcacgggcgggcgtgatattccttacttcctggtaccgattttcggacctatagtaggcgcattattaggtgcattcggctaccgcgcactgattggccgccatttgccatgtgacgtctgcgttgtggaagaagatgcttccaccagcaccaccgaacgtaaagcgtaatccagacactggaataaacggtaactaaagcaggcttattattatgacaacagaaaataatactgaaaaaaaatacatcgttgctctcgaccaaggcaccaccagctcccgcgccgttgtgctggatcatgacgccaacatcgtgagcgtttcccaacgggaatttacccaaatttatccaaaagccggctgggttgaacacgacccaatggaaatctgggctacgcaaagctcaactctggtagaagtgctggcaaaagccgatattcgctccgatcaaatcgccggtatcggtatcaccaaccagcgtgaaaccaccatcgtatgggaaaaagaaaccggtaagccaatttataacgccattgtctggcagtgtcgtcgcaccgcagaaatctgcgaaaaactgaaaaaagacgggctggaagagtatatccgccacaataccggcctggtggttgatccctatttctccggcactaaggtgaaatggattctggatcacgtggaaggcgctcgtgaacgcgccaaacgcggcgaactattattcggtaccgtggacacatggttagtgtggaagatgacccaaggacgggtacacgtcacggatttcaccaacgcatctcgtaccatgatgttcaacattcatcagttggattgggatgagcgcatgctggaagtgctggatattccgcgcgccatgctgccaaaagtgcgttcttcttctgagatttatgggcaaaccaacatcggtggtaaaggcggtactcgtattccaatcgccggtatcgcgggtgatcagcaggccgcgctgtatggccagctgtgcgttcaacctggtatggcgaagaatacctatggtaccggctgcttcttgctgatgaacaccggcaaagaggcggtacgctccaatcacggcctgttaaccactatcgcctgcggcccacgcggcgaagtgaactatgcgttagaaggggcggtgtttatcggcggggcttccattcaatggctgcgtgacgaattgaaactgatcagcgatgccgccgattccgaatacttcgccaccaaagtgaaagacagcaacggcgtttacgtcgtgccagccttcactggactgggcgcgccttactgggatccgtatgcccgtggcgcaatcttcggtctgactcgcggcgcgaacagcaaccacattattcgcgcaacgctggaatccatcgcttatcaaactcgcgacgtgctggatgcgatgcaggccgatgccaatacacgcctacaatccctgcgcgtagacggcggtgcggtagccaataacttcctgatgcagttccaggcagatattctgggcactcgcgttgaacgtcctgccgtacgtgaaagcaccgcattgggtgccgctttcctcgctggtttagccatcggtttctggaacgatctggacgaagttaagagcaaagcaaccattgagcgggaattccgcccaagcatcgaaacgacggaacgtaactaccgttacagcggttggaaaaaagccgtggcccgtgctcaagcctgggaagaacacgactaatattgtcaactttcgcatcgcagcagccagagctgtaatttgaaagagtacatgcatgacccatcacgcgctgtcgctccccccggcagcgcgttttttatcccttcgcccctgccgccacgccccagtgtgatagaattcccgctctatatccgttttcccattctgcaattaacaggtcgagccatgaaacgtgaattagccatcgaattctcccgcgtaaccgaagccgccgccttggcgggctacaaatggttaggtcggggtgacaaaaatgccgccgacggcgctgccgtacgagctatgcgcattatgctcaacaaggtcaatatcgatggccggatcgtgatcggcgaaggggaaattgatgaagccccgatgctgtttatcggcgaaaatgtcgggactggcgaaggagatacggtagatatcgccgttgaccctattgaaggcacccgcatgaccgcaatgggccaatctaacgctctggctgttttggcggttggtgataagggcaccttcctacatgcgcctgatatgtatatggaaaaactggtggtcggcccgggagccaaaggcgcaattgatctcaatttaccgttggctgataacctgaaaaatatcgcccataaactcaataaaccgttatcagaactgacggttattacgctggctaagccacgccacgacggtgtgattgcccaaatgcagcaaatgggcgtcaaagtgtttgccattcctgacggtgacgtcgcggcctctatcctaacctgtatgccggaaagcgaagtggatgtgatgtactgcgtcggcggcgcgccggaaggggttatttccgcagcggtcattcgcgcactggacggcgatatgcaagggcgtttgttgccgcgtcatgaagtcaaaggggacaacgaagaaaaccgtcgtttaggagagcaagagctggagcgctgtctgagcatgcgcatcgaggcgggtaaagtactgcgtctggacgatattgctcgtaacgataacgtgatcttctcagcgaccggtattaccaaaggggatttgctggaaggtatttatcgtaaagggaatatggccaccacggaaaccctgttgattcgcggtaaatcccgcaccatacgccgcattcgctctactcacttcctcgatcgtaaagacgaagccttgcacgaatatctgctgtaattcatccgactaagcaaaaaaatgataagggcaccgaatcacaagtgcccttaacgtcactaaaccatatgttcctggcgctgcatccgatgagatagcggccaccagcacagcaaaatcaacaacgccatagcaaacatcagcaacccaagactaaactgcccggtctgcggtaacatcgccgatagccaggttgtcaggccggagccgatattctgcaagcctcccaccaaagcacctgcggcacccgccaggtatgggaaaggttccatcgccccggtcgttgccagcgggaataacatacccgcgccaaagaagaacaaagcggcaggaatgatcagcgtccagatattcatgatgccaaaccaaccgggaatccacatcatcagccccgccagcaggcagctaatcactgagtgccacattaaattatggaaagttcgcccttcccgccccgcataccaagccccgaaaaatgccgccggtattggcaggataaatagaatactgaccgtcaggccgctgagacccaatacgccgcccattaatacgccggagctggcttcaaacaccgcaatcccagccagagcgccaatcagcatcaccagataacagctaaaagaacgatcagataacaaggtatagaaactggccagcatgcgcggtttctccgctcgttcagggcgcgtttctggcagccagcggaacatgcaaaaagccacgccgctgcacaataagagtaaaaaagcgtagcaggcgcgccagccaaaccagcttgccaacacgccaccaataatgggtgccaatagcgggctgaccaaaatccccatattcaacatactgttggcataacgtagcgaagtaccggcgtataaatcacgcggcatggtacgcgccatcacacctgcgacaccggtgcccatgccttgcaaagcgctggccgccaccaacatcggtaaattattagagaacaaagcgcctaacgcaccgagcataaatatcgtcatccccgccagaataactggacggcgaccaatgcggtcagataaaggcccgtaaatcaactgcgaagcaccataggtcaacagatatgcagccataacccgctgtacggctccggggcgtacggcaagatcctgagcgatttcagcaatcaccgggacataaatggtctgggccatctggccgacagcaaccagaatgattaacatcagcagcaggtgaaaattctctatttttctcatggtcttaagtaatatctcaatgcagattacatgctttttcctgcgaaaatttcgggcaaatcgcagtacacctttagttatggcgcataagctatcaaattcataacttatatccagctagagtaagattttggcaaatagtactttggcagtaaaaacgaccgcaacgtaaattaatctgtacatcatcaactggattttaataaaaatacccacactttatgctgataacatttaatcgataatggtttcgagccaaatcccataaaatgcctccatcgctatttacatcatgagcacatctgaataacgggagttgtaagcatggctgaatgggtcagtggtaaaatcacgcacgttgaacattggacgaacgccttgttcagcattcaggttgacgcgccaatagatacctttactgccggtcagtacgccaaactggcactggatgtccacggtgaacgggtacagcgagcctattcctacgttaatgctcccagtgataacaagcttgaattctatttggtcaacgttccggaagggaaactcagccctcgcctacgtcagcttcgggtcaacgatgaaattatggtgaccaaacaagccgcaggtttcttcgttctggaagaaatccctgactgcaacaccctgtggatgttagcgacgggtaccgccattggcccttatctgtcgattttgcaggaaggtcgcgatttggaacgtttcaacaatctggtactggttcacgccgcacgctttgctcaggatctcagttacctgccgctaatgcagcaactggagcaacgctacaatggcaaactgagaattcaaaccgtggtcagtcgtgaagagtcccccggttctctgaccggacgcgtacctgcgctgattgaacatggcctgctggaagcggcggtaggtttgaagattgatagcgaacgcgatcacatcatgctgtgcggcaacccgcagatggtccgcgatacgcaacagacgttgaaagatcagcgtcaaatgaaaaaacacctgcgtcgcaaacccggccatatcaccagcgaacattactggtaactcgaatcagccgttaaatttggtcgaaaaaaagggcgctaagcgccctttttcatctaaatagcccgttattgttttttctcaggcaaaaacttcaccggatctggttccgggccaaaacgattatcgccttcgtgacccagaaatgcgccgcaatcaatcagcatcatgacaataatcagcgtgggaatgaaacgcccaacgccccactgccagatcggcgccaacatttgccagtttccagccatcagcatccaggccagcaccaccaacagcgcccaccaaccgactttattgcgatcgtgcaggcgttttaccacaactgccgccgttggccacagcagaaaaacaatcgcaaaggcggcggtttgcatcggcaatatctcttgcccggcaagcgtaaaaatagtcgccatggccagtagccacaggccgatccaaatccaaaaatcacgacggccaatccggcctttaaacgaaaaacaccattgctgaatggtcatagagattcgattccatttcttcgaaattattgcgccaaagtgtaccctaacgccgagcttaacgaataatctttgcgaggatttttgacaacggctaccgaataccgttttaatcttccacacactcccttaactacggcgtaagtcatgagaaataccatagccgctgtgctcgccattttagtgctaatggccacggttagccgcacagctcatgctgacccaacggataatagcggcgctccggtgccgaacaaccaacccactgcgccctatctgctatcaggggcaccgacttttgatttaaccctggtaaaatttcgcgaaagctacaaccaggccaatccatcattacctattaatgaatttcgggccattagcgctaaagatgagggcagcaatctgacccgtgctgccagcaagattaatgaaaatctttatgcctcaacggcgctggaaaaaggcaccggtaaaataaaaactctgcaaattacttatttaccgattaaaggtgatgaagagaaagctgcaaggctggtcgctatcagctatatggcagcgttgatgcgtcagtttgaacccaccttatcgctacagcaaagtctggataacgtactcaaactgctagcgcagggaaaaggctcccatttccatagccatgctgtcggtgcgatccgctatgtagtggcagataacggcgaaaaagggctaactttcgctattgaaccgattaagctggcactatccgagccataatctcggcgtaattaatgacaaaaagcaaagccattgccattaatcatctctatactgttgggcaggtaaactgccggtccggcagtcattattattgaccctcgcgtccctggttggaggaagaaacatgcgtcatccattagttatgggtaactggaaactgaacggtagtactcacatggttaacgagctgatcgctggcctgcgtaaagaactgagcaatgttgacggctgtggcgttgccattgctccaccagcaatctatctgagccaggctaaacaccatctttccggtagccgtattgctctgggcgctcagaacgtcgatgttaatctttccggcgcatttaccggcgaaacttcagcagaaatgctgaaagatatcggtgctaaatacatcattatcggtcactccgagcgtcgtacttatcaccacgaaagtgatgagttcatcgccaaaaaattcggcgtactgaaagacgctggcctgatcccagtactgtgcatcggtgaatctgacgcagagaacgaagcgggtcaaactgaagccgtttgcgctaagcaactggacgcagtgctgaacactttgggtgcaaaagcattcgaaggcgcggttatcgcttacgaaccaatctgggccatcggtaccggcaaatcagccaccccagcgcaggcgcaggctgttcacaaattcattcgtgaccatatcgccaaacaagatgctgcagtagctgaacaagttattattcagtacggcggttctgttaacgataaaaacgctgcagaactgttcgctcagccggacatcgacggcgcattggttggcggcgcatctctgaaagctgacgctttcgcagttatcgttaaagccgcagctaaagcgaaaaaagcataattcacgtttaaatacgtaaaaatgcaaaaaccccggtaacggggtttttttatgtctgaatctcaatgccgtttagcgcttattgatctcgtcaaatacgccgccggtagcaaaatgcacctgttgggctttggtccacccgccgaaaacctcatctatggtaaataatttcaatgttgggaattcgctggaaaatttggccgctactgtcgcatcacgcggacgatagaagtttttcgccgcaatggtctggccttctggcgaatacagatacttcaggtaagcatcggcgacttcacgggttccacgtttatcgacgactttgtccactaccgaaaccgtcggctcagccagaatggaaacgctcggcgtcacaatatcaaactggtctttgcccaattcattcaccgccaatagggcttcattctcccaggcaatcaatacgtcgccaataccgcgctcaacgaaggtatttgtcgcgccacgcgcaccggagtccagcacttcaacatttttatacagcgttttgacgaattcctgcgccttcgcctgatcgttattgttgtgctccagagcgtagccccaggccgccagatagttccagcgagcgccaccggaagttttcggattcggcgtaatcacggaaatccccggttttaccaaatctgaccaatcgtgaatttgcttgggattacctttacgcaccagaaaaacgatggttgaagtataaggagcagaattatccggcaggcgcttaatccagttcttatcaatccgaccacgttcagcgattgcgtccacatcgtaggccaaagctagcgtcacgacatcggcttcaataccattgataactgaggttgcctgcttaccagagccgccgtgcgactgacgtaccgtgactttatccccagtttgctgctgccagtgtttactgaaagcctgattatattcctgatagaattcccgcgttgggtcgtaagaaacattcaacaactgaatatcttttgccacggcacctgatgccaccagcattaatgttaaacctacaccccatttgcgcatcgcccgctccccagaatttatataatcaaccccaataggttggataagataaagcctgccagaaactaagctaacgattaaagaataaaaaataccctattatatctttaagaaatatacgttccgtaaaatgcaaaaaacccccgcgagcggaggcttttttcagacctggaacgtggattagaacagttttttcgctgtgtcgtaccagtcttctttgaatttgcttttcttgttcttcggatcgatacacacagaaatcaggtcgttaaccattttctcattctgtacgccgacgcaaagaccgcctttgctctgatcaacatttttcatcagcagttcaaccgcataagcacccatacgggaagccagaattcggtcataagctaccggtgaaccaccgcgctgaatgtggcccagtacggttgcacgggtttcacggccagtttctttctcgatatatttagccaactcatcgatatcacagagtttttcggtgatagccacgatggcatgttttttacctttggcgataccggctttgatctcacaaaccagatcgtccggattgaaaggcacttccggaatcgcgataaactcacaaccaccggcgatagctgcagccagagtcaaatcgccacagtagcgtcccatcacttcaacgatagaaatacgttgatgagaagaagaggtgtcacgtaaacggtcaatggcctcaaccacagtatccaacgcagtgaagaaaccgatggtgtagtcagtacccgccacatcgttatcaatggtgcccggcaggccaacgcaggaaataccgccttccgcctgcagtaaatcagcaccggcataagaaccatcgccgccgataacaaccaatccatcgataccgcgcgctttcatgttctcaatggcttttgcacgaatggccggatcgcggaactcagggaaacgcgcagaacccaggaaagtaccgccccggttgatcatgtctgaaacgctgtagcgatccagctgttccatgcgatcttcatacaagccgaggtaaccatcataaataccgaaaacttccagcccttcagacaaagcagcgcgaaccaccccacgaattgccgcgttcatacctggcgcgtcaccgccgcttgttagcacaccgattttctttaccatgactacctctgaacttgtagatgcgattttttgagaattctttattagccgattatgccatgagcacgatactagtacataaaatcaacgctacgaccatgatattggatattatagcaaaaacactatgctgaattgattcaagtcacacgaagtaacggtaaatatttccatcattctgtaacacagtttcaagaatcaacgcaaaattacagctcccaatgagcatggcgctcttttggcactaccgagcaaggatcttgatggataagcacatcagcacccggaaaacggtgtaacaacgcgcgttcaacctgttcagctaaaatatgcgcctgcatcaacggtagatcgtcttccatctccagatgcagctggataaaacgagtcggcccggattgccgcgtacgtagatcatgagcgccaatcactcccggccaggaagtcacagtatcaataatggcctgccgttcttcatcaggtaaggccctatcaagcaatgactgtaccgcttcatagcccatacgcagggcgctatataaaatataaacgcctatacccagcgcaaataacgcatcggcgcggtgaaaaccgtaccaacttaaagccaatgctataagaatagcaccattcatcatcacgtctgattgataatgtagcatgtcggcccgtatcgcctggctttgggttttacgcaccacccagcgctgaaatgtgactaaaatcagggtactgaataacgcgactaaagtaacgccgacgcctataccgggatcttgtaagggttccggcgaggcgagatgctggaagccggttaaaaacaggaataaagcggagccagaaataaacatactttgagccaaagcggccaaagactcggctttgccatgaccaaaggtatgctcttcgtccgctggttgcagggagtaacgcaccacaaacagattagtgagagaggcagccagatccaccagtgaatcgaccaaagccgccaatacgctgacagaaccggtcgcccaccaggcaaatattttaattaacagtagaattgatgctagtgcagtagccgataaggccgcagctttaaccagccgcgcatattgcagatccataacttgtcccaaattgaatcttagggggcaagtataacggataccggcaaaaaaaagccctccatcatggagggctaaaagacagggatggtgtctatggcaaggaaaacagggtattactgggtagtaccttacggtactggatagtactttacttctgggcagaagccggttgtgctgctggagcctgctgcactgtagccatccgctgtttatgcatctggtttaaggcagttttttgctctggcgtcagcaggttgtacatttggttgcgtactttggccatttcgacctgacgctcaacctgttgtttagacattttttcagcctgcgctcgaactgcggcttcatcaaatttatctgcggtaatcagactatgcattgcttcccgatcagcgacaggcattgccgttttagttccgcgatgctggcgcatcagatcgcgcatctgctgacgctgttgctcagtcaggttcaagccttcaaacatgttatggtggccgcgaccacctttcatcattttgccgtcgaagtcgtgacaccagttgccagcggttgcaacagtatcagcggcaaatgcggcggtagagccgaaggccaacattgacgctataactaacgttgttactttacgcatgattaactcctggattcactctgctatgcaattcaatgttaagcagtgtataggtctggctgaaaactagcgtcagtgcatgtaaaactgaggtcaggggatgtaaatctaggtaaagtcatagaatcgcggcaattgttaacgtattttgcgtctagaggtgaaataactatgcataaaattctacttgttgatgacgatcgcgaactaacttcgctattgaaagaattacttgaaatggaaggcttcaacgttgttgttgcctatgacggcgagcaagcgctaaacctgctggacagttcgatcgacctgcttttgctggacattatgatgccgcgtaaaaacggtatcgaaaccttaaaagagctacgtcaacatcaccaaacgccggtgattatgctgaccgcgcgcggcagtgaattggaccgggttctgggtctggagttaggcgcagatgactatttggccaaaccgtttaacgatcgtgaattggtagcacgcatacgcgctattttgcgtcgttccaattggagcgaacagcagcagaatgtagatcaaggcgcaccaacgctagaagttgactgcctgcaactgaatccgggtcgtcaggaagccagctttgaaggtcaggtactagatttaaccggcacagaatttaccttgctgtatttactcgctcagcatctgggccaagtggtttcgcgtgaacttctcagccaggaagtcttgggcaaacgactgacgccatttgatcgcgccattgatatgcatatttccaacctgcgtcgtaagttaccggaacgtcaggatggtttaccttggttcaagaccttgcgtggccgcggatatttgatggtatctgaaacatgatcaacagtttgacggcgcgaatcttcgctattttctggtttactctagcgctagtgctcatgctagtgctgatggtgcctaagctggattcgcggcagttaacgccgttattagaaaatgagcagcggcagggcgtcatgctggaacagcatattgaagttgaactggccaacgatcctgccaatgatttgatgtggtggcggcggctgtatcgcgccattgagaaatgggccccccccggccagcatctggtgttagtgaccagcgaaggccgggtgattggcgctgaacgtcatgaaatgcagattgtacgtaactttattggccaatcggataatgccgatcagccgaaaaagaaaaagtatggtcgatcagaaatggtcgggccattttctattcgtgatggtgatgacaactaccaactctatttaattcgaccagcaagtagcccacagtccgactttatcaacctgatgtttgatcggccgttactgttactgattgccaccatgttgatcagtgcgcctctgcttctctggctggcatggagcctggctaaaccggctcgtaaactgaaaaatgccgccgatgacgtggctcgcggaaatctgaaacagcatcctgaactggaatccggcccgcaggaattcctagccacgggtgccagtttcaaccaaatgatcagtgcgttggaacgaatggttgccgcacaacagcggttgatttccgatatttcccatgagcttcgcaccccgctgactcgccttcagttggcgacagcgttgatgcgccgtcgccatggagagggaaaagagctggaacgcattgaaacagaagctcatcggttggacagtatgatcaatgatctgctagtgctttcccgtaaccagcataagaatgagctagcacgagagccgattaaagctaatgacctttggtctaacgtgctggaaaatgcgcaatttgaagccgaacaggtgggtaaaacgctggaaatctctgctccaccgggcccttggacgctatttggtaatccgtcggcgttggatagcgcgttggaaaatattgttcgtaatgctctgcggtattctcaccaccatatcgcagtagcgttccaagctgataatcaaggcgtaaccatcactgttgatgatgatggccctggcgtcagcgcagaagaccgcgaacagattttccgtccgttctaccgcactgacgaagcccgcgaccgcgaatccggcggtacaggcctaggtttagccattgttgaaaacgccgtaagccagcatcgtggctgggttagggcggaagatagcccgcttggcggcctgcgcttgattctctggcttcctctacacccattcaaagcctagtcatttggccgatcccacaggttcggccagatcgacacattttctcactggccaaatctgcccatatcaacggatgcccactgcaccaaatcggagtttctggtatcctgcgcccctctttactggggggcctatgctgaatattgttttatttgaaccggaaatcccaccgaacaccggcaatatcattcgtctgtgcgccaataccggctgccagcttcatttgatcaagcccttgggctttacctgggatgacaaaaggctgcgccgagcgggcctcgattatcatgagtttacgaatattaagcatcatcatgattatcaggcttttctcgacagcgaaaaacccgagcgcctgttcgcactgaccaccaaaggtacgccagctcatagtgcggtgagttatcaggataaggattttctgttatttggcccagaaactcgcggtttacctgccagtattctggatgcgttaccggcacagcaaaaaatcaggattccaatgcaaccagatagccgcagtatgaatctatcgaacgcagtttctgtggtggtatatgaggcatggcgccagctgggatataacggcgcattggtgaaagagtaagaaatttgtcagaaaggggctcagagtggccccgttcgattaatagcaggaatcagataccgtcgccgtattcaaaaccttggctgacgccgttgaagtgctggtccatatccagggagggtttatcactgtccggtttacccacgatccgagccggtacacccgccgcagtggtatgaggcggaaccgcttgcaataccacagaacccgcaccaattttagcccctcgacctacctcaatattgcccagaattttcgccccggcaccaatcatcacgccttcgcgaattttaggatgtcgatcgccgctggttttaccggtaccgcccaaggtgacggattgcaaaatagaaacgtcattttcaacaactgccgtttcaccaatcacaatacctgtggcgtggtccagcatgatgccgcagccaatggttgccgcagggtggatatcaacaccgaaagccacagagacttgattttgcagataaatagccagcgctttacgctcttgcgcccataaccaatggccaattcgataggcttgtaatgcgtgaaaacctttcagatacagcagtggcgtagagtatttatccaccgcagggtcacgcaagcgcacagccaaaatatcgcgcgcggcggaaacaatcatatggggatcgctgcggtaagcgttttcgaccacttcccggatagcaatagcaggcattatgggatcggctaatttattcgccagaatatagcttagggcactgcctaaattctcatgctttagcaatgtcgcatgaaaaaagctggccagcatgggttcacaatcagccagcgcccgcgcttctgatttaatgctgctccagacctgctctaattcttctgacgacatgccttactctccctatgatacaaacaagtcaccccgaggaaaccccaaggtgacttagtacgcattgatctaacgggttaaacgccgcttttttcgtcttttttggtgcgccctaataaggtcagggcagcttcgcgggcatttttatggcagtacagcacctgatagatctgttcggtaatgggcatttcaacaccataccgttgcgccagagctaatacttccttggtatttcgataaccttcgacaacctggccaatcttgtcctgcgcttcttgaacccctgcgccctggcccagcatgataccgaatctgcggttgcgagattgattatccgtgcaggttagcaccaaatcacccagccccgccatgcccataaaggtggaaggatcggcacccaacgcggaacccaaacggctcatttcggccaaaccacgggtaatcagcgccgttcgcgcattcgcgccaaaaccgatgccgtcagacatacctgcaccaatggcaatcacgtttttcaccgcgccgccgagctgcacgccgataaaatctgggttgctgtaaacccggaaacttttaccgcagtggagcagcgcttgcaggtcttcgctgaactgagcgtccgttgaagccaatgcaatcgccgtgggcattcctgccgccagctctttagcaaaagtcggcccggaaacaaccgccagcggaattgtatcgccgaggatttcccgtgctacatcctgtagcaaacgcccggtttcagcttccaaccctttggttgcccaaacgatacgcgcatcgctgcgtaaatggggttttaactgatgtaaaacgttgccaaaaacgtggctcggcactaccaccagaatattacgactgaccgccagtgcgcgggacaaatcggtttctagcaataatgtgtcggggaaagggacgtccggtagaaaagcctgattacagcgagcatcctgcaacgcctgaatgtgtttgggatcgtgtccccacaacacaacggtgtgaccattacgcgctaacgtgatggctaatgcggtgccgtaagatccggcaccgattacagtcattgaagcatcagtggtgttcatcaggcatcctgacgttgttcggcaccttcgccttcagtttgagcctgctgctgcaaatagttcatgaacagggcatcaaaattaaccggtgccagattcagctgagggaaagtaccgcgggaaaccaggctggtgatacattcacgggcatacgggaacaaaatgttcgggcagtatgcgcccaggcaatgtgccagttgggtgccatcgatgccagcaatggagaaaataccgccttgctgaacttcacacaagaatgcagtttcttcgcccagagaggccgtaactgttacgcgcagtaccacttcatacacatcttcagccagctgactggaagcagtatcaagatcaagtttaacttctggctgccaatcctgctggaaaacctgcggtgcatttggcgcttcgaaagagatatccttggtataaatacgttggatctggaaagccatctctgtgttgttttgttctgacatgtgtaaaagtacccttagttagacatccttattaaacagcactaccgccgtgggaatccccatcgacgagtttaaagcagtgggtcaagcccaccgcgcgcatccagcgcatgtaaatcatcgcagccacctatgtgctgcccatcaataaatatctgaggtacggtggaacgtccgctgcgttcaatcataacttcacgcgtcgccatatcaccatcaatcgcgatttcctcgaacgctgcacctttgctgtttaacagcgcttttgcgcgaacgcaaaacgggcaggtcgctttggtgtatatctcaattttcgccattgacaaaacctcagttatattaatattccgttgataaagcgatggttttattacttaccacgttttatttaccgcgagccagaggcagattttcaccgctccagccagagataccctctttcagagtaaatacaggttcaaaaccggctttgttcaaattttcggcagacgtacgagacgcagtaccgttagcacaaacaacaataataggctgcgctttatgcttttccaactcgcccaagctgccgtttttaatttcagtcggcgttaggttaatggagctggcgatatggcccttgcggtaatcttcgcgcgaacgggtatcgacaacaaccgcatcttctttgttaatcaaacgcgtagcttcaccacgagtgatttcttttactttagacaggctgcttttaaaggtggtgacgatcacggcaaccagcaaagccacccaagccagactcaaaataggatgctggctaatgaattgcataatttcttgcaacatagggggaaaaactcccgttagttaggggtcaatattcaaggtcacagagtatacctgcgcgttgcagcaaatacagccagtaagcaagtggtattgcagaaactgagagggatcgcggaaagttttcatcatttaaaccaccacaatcacgcccatcccacgccaaccttgatctctttgggctatttttaacctgctttgtagtaaaattacgaaagcgataagtgtcaatagccatgagcgacccacgtataacccatgcctattaacacttggacttataagaaaatgaggttaagcaatgtcgagcaataaaaaaccattagttctgactattctggatggctatggccaccgtgaagaccatcaggataacgctattttgaatgccaaaacgccagtgatggaccgcttgtggcagcaaaatccgcacacgctgattgctgcttccggtctggacgtcgggttgccagacggtcagatgggtaactctgaagttggccacgtcaatctgggcgcgggtcgcattgtttatcaggatttaacccgcctagataaagagatcaaagagggcgatttctttgttaacccgacgctgaccgccgccgttgataaagcagtaaaagctggcaaagcggtacacatcatgggcctgctatccgccggtggggttcacagccacgaagcgcatattctggcgatggtcgagctggctgcccaacgcggtgccgagaaaatctacctgcacgccttcctcgatggccgtgatacgccgccgcgtagcgccgagtcctctttgaaaatgtttagcgataaatttgctgcattaggcaaaggccgtatcgcctccattattggtcgttactacgcaatggatcgcgataaccgctgggatcgcgtccaactggcttatgacctgctaactcaggccaagggcgagtttaccgcagccaacgccatgcagggtttggctgatgcctatacccgcggcgaaaacgacgaatttgtaaaaccgacggtgattcaagccgctggcgaacccgatgccgctatgaatgatggcgacgcgctgatctttatgaacttccgcgccgaccgcgctcgtcagatcactcgcacctttattaatccagactttgacggcttcaagcgcgataaagtagttaacttcggcgatttcgtgatgttgaccgagtatgcagccgatatcaatgctgcctgcgcttatccgccagcatcactggttaatacctttggcgaatggttaatgaagcacgataaaacccagttacgcatttctgaaactgagaaatatgctcacgtcaccttcttctacaacggcggcgttgaagaaccatttaaaggtgaagaccgtattctagtgaattcaccgaaagtggcgacttatgatctacagccagaaatgagttctgccgagctgaccgaaaaactggtcggggcgatcggcagcggtaaatacgatgtcatcatctgtaactatccaaatggcgatatggttggtcataccggtgattatgatgcggcagtaaaagcgatcgaaacgctggatggctgtattgcacaggttgttgatgcagttaaagctgctgacggtcagttgctgattaccgcagaccacggcaacgccgagcaaatgcgcgatccggcgacaggtcaggctcacaccgcccacaccagcctgccggttccgctgatttacgtcggcaataaaccggttgccgcggtggctggcggtaagctttctgatatcgcgccaaccatgctgtcactaatggaaatggaaatcccgcaagagatgactggtaagccgctgttcatcgtggaataatcctttcttatgaaggataaggcgttatttgcacgtttgatggtgactgaaaacgcaacccccggcagcagccaatccccagtgggcctgctgccaacccggtttacgcgtcgtccgttagccatactgtacgccagcgttttttgcgctggcgtcttgctattgccattatccagccaggctgcagatgctcccgttgctgcaaaaacggccgataacaagagccaattgaaaactattcagcaaaatattgctgaaaaagagaaaagcgttcagcaacaaaaacagcaacgcagcgcactgctcgatcagctgaaacaacaagaaaatactattgcccaagccagccgtagcctgcgcgacacccaagccactttgactgagttgggtaaagacgtcgccaagctcaacggctcgattgaaaaactgcaaagtcagcagtcactccagcaaaatattctagctaaacagttggatgcagcctttaaacaagggcagcacagcggattgcaactcattcttagcggtgaggaaagtcagcgtagcgaacgcattctggcctatttcagctatctgaatgaagcccgtctgaaatcaatcaatacgttaaaacagactcgaagcgatctcgcggtgcagaaaaaaacgctggtagaaaaacagcaacagcagaaatccctattgaacgaacaacagtctcagcaacagaagctggaacaggctcgttcagcacgtaaaaaaacgctgatttctctggaagcctcgctggaaaaagaccagcagggtctggcggaactgaaacagaatgaaacccgtctgcgcgatcaaatagccaaagcagaacgggaagccaaagcccgcgctgaacgagaagccaaagaggccgcgcgggttcgagagcagattaagcttaaagagcaacaagcgaagaaaaccggctctagctataagccgagcgaaagtgagcgctctctgatggcacgtaccggcggtttaggtcgcccaagtgggcaggctttgtggccagtacgcggtaatgttacacatagatttggtgaagtattacagggagaactacgctggaaaggtatggttatttccgcgccagaaggcagcgaagtcaaagccattgccgatggccgcgtcctgctggccgactggttacagggctacggtctcgtcgtcgtcgttgaacacggtaaaggcgatatgagtttgtatggttataaccaaagcgcgttagtcagcgttgggactcaggttagagccggccagccgattgctctggtcggtaccagcggaggccagggtgagccttctctgtatttcgagatccgtcgtcagggacaggcggtcaacccacaaccctggttaggaagatagggaattgaattagggaaaaagcattgcgctattttaaagctcgctcactgtttgtattcggcactttgctgatagcctgctccgcgcaggcaggaaaattatctattgttatcgatgacttcggttatcgcccgcagaacgaaaacaaaattctccagatgccgttaccgatctcggtggccatcttgcctaatgctccccacgccaaagaaatggccatcaaagcccacagccaagggcgtgaggttcttatccatctgccgatggcacccttgagcaagcagccattagaacgggatactttgcagcctaatatgagcagcgaagaaattcagcgcattattcgtcaggcggtaaacaacgttccttacgccgtaggtatgaataatcatatgggtagcgcaatgacttccagcctgtccggaatgcaaaaagtcatgcaggcgctggaacattatcagctgtattttctggatagcgtgacaatcggcaatactcaggccagccgggcagcggaaggcactggcgttaaagtcataaaacgcaaagtttttctggatgatgtgcagaatgatgcggctattcgtcagcagttcaatcgcgccattcagctagcgcgtaaaaatggttcggctattgccatcgggcatcctcatccctctaccattcgggtattgcagcagatgctgccggaattaccgtcagatatcgtattggttcgccctagtgcgttactgaatgaaccggtgcagcataattcaggcacgctgacgccagtcaagccggttaaatcacgcgatccgtttaaagacagcaggttaaaagccattaagcaatgtaaaatgaaagcgggacatacgccagagaaaatctacgccgacgagatgtttaaaattctgggggaaagtctgatacaaagcccagtggcgactttcgtgcagcagcgctggcatttctggtttaacaaaaccaaataaaacaatgccgggtcatcatgcccggcattgtttatctacctgatagaatctcagttagccgttaatcccagctcaatacgactttccctgattgaccagagcgcatagcgtcaaagcctttctggaactcatcgatagagaaacggtgagtaatgattggtgttaaatccagaccagactgaattaatgcagccattttgtaccaggtttcgaacatctcgcgaccgtagatacctttaataaacagccctttaaagataacctgattccagtcgatagacatatcggatggcggtatccctagcatggcaatgcggccgccgtggttcatcgcattcagcaaagtacggaaagctggcggcgcgccggacatttccagacccacatcaaaaccttcggtcatacccagatcagtcatcacgtcgttcaggttttctttactaacgtttaccgcgcgagtgacgcccattttgcgcgccaaatcgaggcgatattcattcacgtcagtaataaccacgttacgcgcaccgacatgtttacacaccgctgcggccatgatgccaataggaccagcgccggaaaccagcacatcttcccccaccagatcgaaggacaatgcagtgtgaaccgcgttaccaaacggatcgaaaatggcggccagctcatcgggaatgttgtcaggaattttgaacgcattgaaggcaggaatcaccagatattcagcgaatgaacccgggcggttaacaccgacgccaatggtattacggcacaggtgagtgcggcctccgcgacagttacggcaatgtccgcaggtaatatgcccttcgccagaaacgcgatcgccaatggaaaaacctttaacttcctgaccgatagcgacaattttaccgacgtattcatgccctacaaccataggaaccgggatagttttttgtgaccattcatcccagttataaatatgcacatccgtaccgcaaatcgccgttttagcgattttgatcataatgtcattgtgacccaattcaggctgaggcacatcggtcatccaaatgccttcttccgctttcagcttagatagtgctttcattgaaattccttatgcaataacgcctagttgtttaccaatgcgcacgaatgcattgatggtacgttcaacctgctcagtcgtgtgttcagcagacatttgggtgcgaatccgcgcccgacctttcggcacgaccggataaaagaaaccggtaacgtaaataccttccttcagcaacgcgttagcaaattcctgcgctaatttagcttcgcccagcattaccggaataatcgcatggtcggctcctgccaacgtgaaaccagccgccgtcattttttcgcggaatagacgggcgttagcccacaggcgttcccgcagagcatccccttgttccagcagagaaaggacttcaatggacgctgcaacaatcgccggagccaatgagttagagaacaggtacggacgtgaacgctggcgcagccattccaccacttctttacggcctgcggtatagccgccggatgcgccgcccaacgctttacccaaagtaccagtgataatatcaacacgacccatcacttcgcagtattcatgggtgccgcgcccgttggcaccaacaaagcctactgcgtgggaatcatcaaccatcaccagcgctttatattgatcggccaaatcacaaacgcctttcaggttagcaatcacgccgtccatagaaaacacgccatcagtggcgatcatgatatgacgagcgccgtccgcttttgcctgcttcagttgggtttccagctcagccatatcattgttagcgtagcgataacgcttggctttacacagacgcacgccgtcaataattgacgcatggtttaacgcatcggaaataatggcatcttccggccccaacagcgcttcaaacagcccgccgttggcatcaaaacaggaagaatagagaatggcatcttccatccccaggaagctggcgatcttctgctccagctgcttgtggctgtcctgcgtaccgcaaataaagcgcacggaggccataccaaaaccgtgtgtgtccatcccttttttcgcggcagcgatcagcgccggatggttagccagccccagatagttattagcacagaaattgattacatgacttccatcagctacagcgatatcgacttgctgggcggaagtgataatccgctcttctttatacaaaccttcagcacgggtagtagccagttgttgttctagttgttgatagaaagacgcgggcattcggttatctccagatttggcaatttcgcctcacattttactaagttgctggcttactgacgagaaaccttgttagagaatgtaagaaatgcagcatatatcacggggaactatcctaaagccccatacaaaaagggcgattaccccccttccggctgtgcgcttacgcatgaaatgttatgatggcaccaaataatgtgtagggcattgtgcccaaccaagcagattaataagggtgaacctgatgattatcgtcactggcggcgccggttttattggcagcaacatcgttaaggcactgaatgatataggatataaagatattctagtggtagataacctgaaagacggcactaagttcgtcaatctggtcgatctggacatcgcggattacatggataaagaagattttgtcgctagcattgttgccggtgatgatatgggcgatatcgacgccatcttccatgaaggcgcttgctcctctaccaccgagtgggatggcaagtacatgatggataacaactatcagtactccaaagacattctgcatttctgtctggatcgcggtattccattcctgtatgcctcttcagctgcaacttacggtggccgaaccgataatttcattgaagatcgccaatatgagcagccactgaacgtttacggctactcaaaattcctgttcgatcaatatgttcgtgaaattctgccgcaagcggattcacaaatttgtggcttccgctatttcaacgtctacggaccgcgcgaaggccataaaggcagcatggcgagcgttgctttccacctgaacaatcaaatcaacgctggtgaagcacctaaactgttcgctggcagcgagaactttaaacgcgatttcatctatgtcggtgacgtagctgcggtcaatctgtggttctggcagaacggcgtttccggtattttcaactgcggaactggccgtgccgaatccttccaggcagtggcggacgccgtggtggaataccatcagagcgggccagtggaatacattccattcccggaaaaactgaaaggtcgctatcaggcattcactcaggccgacctgaccaacctacgcgcagccggttatgacaaaccgttcaaaaccgtcgccgaaggggtaaaagagtatctgggctggttaaatcgccctatttaagtcattcgctgcaaggaattgataacggtatgagaatactggtcatcggcccttcttgggttggcgatatgatgatgtcgcaaagtttgtaccgcaccctgaaggccgaatatccggcagcagagattgatgtgatggcacccgcgtggtgccgtccacttctggccagaatgccagaggtgcgccgcgctatcccaatgccgctcggtcatggggtatttaatctggaaggccgtcgccgtttgggtatcgctttgcgcgaggaagcctatgatcgcgcctatgtcttacccaattcgttcaaatctgcgttaataccctacttttccggtattcgtcagcgtacaggctggcgcggtgaaatgcgttatttcctgctcaacgatatgcgcattctggataaacaggctttcccgctgatggttcagcgttatgttgcgctggcttacgataagtcgcgaattacttccgaagccgatctgccgcagcccattctctggccgcagttacaggtgcaggatgaagaaattgcggaaaccaccgccgcttttaatctcagcgataatcggccaatcatcggtttttgtcccggtgccgaatttggcccagccaaacgttggccgcactaccattacgccactttggcacaaaaactcattgatgacggttatcaaatcaccctgtttggttctgaaaaagaccataaagcgggagaagatattcgtcaggcacttcaggcagaaagtcgcgatttctgcctgaatctggctgggcaaacgacgctggatcaagcggtaatactgattgccgcctgtagcgccgtggtgagcaacgattccggcctgatgcacgttgccgccgcgttgaacaaacctttggtggccttatatggcccaagcagcccagccttcacaccgccactttcagataaagcgacggttattcgtttgattaccggctaccacaaagtgcgcaaaggagatgccgatcaaggctaccaccaaagcctgatcgacattcagccagagcaggttttggccgcactacagctgcagttggcaacacagtcttcaacggtaaatgaggcgcactgatgcacgtattgatcattaaaacctcatcgatgggtgacgttttgcatacgttacccgctctgaccgatgcaatgagcgccattcccggaatccgtttcgattgggtggtagaagaagggtttactcagattcccagttggcatccggcggtggataaagtgattccggtggccattcgccgctggcgcaaaaactggtttggtagtgatacacggcaagaacgctgtgacttcaaacgaatcgtgcaagagcgcagctatgatttggtgatcgatgctcagggcctgataaaaagcgcggcgctcatcacccgcattgccaagggcacccgacacggcccagattgcaaaagcgcccgggaacccttcgccagttggttttataactgccgtcatgaaatagacaagcagctacatgccgttgagcgtactcgccagctctttgctaaaagtctgggttataccaagccggaaaccgtcggtgattacgctatcgctcagcgtttcctcagccagttaccgccagacgctgggcaatatctggttttcctacatgcgacgacccgtgacagtaagcactggccggaaagccattggcgtcagttaattcagttggttcaacctactgggctgaaaattaaactgccgtggggcgcagagcatgaatatcaacgcgcagtgcgtctggccgataatttccctcacgtggaagtgctgccaaaactgagtttacagcaagttgccgaggtattagccggtgccaaagctgtggtttccgttgataccgggctaagtcatctaacggcagcgttagcgcggcctaacatcacgctgtttggcccaaccgatcccggattaattggcggttatggtgaaaatcaggtatccgttatctctaaagagaaaagcatggataccattcaagccaaaattatcatggcagaattggataaaatcatcgtctaagtgaccgaatcccctcatctgcgcagcctctctcgctgcgcagttttctcttaactctcactgattaccctttatcagacgaatattttgccgctcgcttcgctgcggaaaatattaataatatgctgttagtttttaccgtgataattaactattacatgcatgagaaaatgatatttaagtaagaataagtcatttatccgcagcgatattccggcgattaacgaaagtaattaaaggaaatctctaataaaggcgatcatcttcataacgaccaatgggttaagcaatgtcatgaagcactcagatattttatctctctgtaatacggatattttcaggttaatagataaaaaataatcaccaataaacttctcactcttatatgctgtttttcgcctttttactgtaatcagtcttattctcgataagataaaaatacccgttcaaaccagggaacgggttcggtttttatactgattaatatatgagcgggtaaaatagatcggcgctagccaccattggacattacataaccggaagagagcctttcttcagcagttatggtattattctgaataactcatataaatgaatttgatagaatgttgctgcgtttatatcaggtactcctctacctaatccaacctttgatttggctgcgattgttgctacgtagccgtaaagcccctgcttaccgtaagcgctggggagaacgttatggtttctgtgccggtaaagtggtctctggcggcattatgctgcattccgtttctgtcggtgaaactctcgcggctattccgttggttagagctttacgccaccgctatccctcattgccgattacggtaacgaccatgacgccaaccggttctgagcgagtgcaatctgcctttggcaaagacgttcatcacgtttatctcccttatgatcttcccggttccgtaaatcgttttctcgatcaggttaatcctaagctggttatcatcatggaaaccgagctatggccaaacctgattaatgcgctgcaccaccgtaaaattccattagttatcgccaatgcgcgactttctgcacgttcagccgcaggttacaaaaagattggcggttttattcgcaatatattgcgacgtatcacgctgattgccgcgcagaatcaggaagatggtgagcgttttatcgaattgggtctgaaacgatctcagttgaccattactggcagccttaagtttgatatctcggtcacaccagaactggccgcacgagcaataaccctacgccgccagtgggctgcccatcgccctgtgtggattgcaaccagcacccacgacggcgaagaagccattttgctggaagctcatcgtcaattgttattacagtatccaaccctattattgattctggtgccacgtcatccagaacgtttcccgaaagcgattgaactgacccaaaaggccggattcagctacaccttacgcagcggtggcgaagtgccatccagcagcactcaggtggtgatcggcgataccatgggtgaacttatgcttttatatggaattgccgatatggcatttgtcggcggtagcctgatagaacgcggtgggcacaacccactcgaagccgctgcccacgcgattccagtgatgatggggccacatactttcaatttcaaagatatctgtgccaagcttgagcaggccgaagggctcatcaccgtcaccgatgcagcctcgctggtgaaggaaattagcgtactgctcaccgacgaagattgccgcctctactatggccgccatgcggttgaggttctgcatgagaaccaaggggcattgcagcgattattgcatctgttggaaccttatttgccgccgcggagccactaatgagcgccaaaaaacgtctgtctgtggtgatgatcaccaagaatgaagcggatctgctcccagaatgcctggactccatttcctgggctgatgagattgtcgttttagattctggcagtgaagacgacactttggatttagctcgtcaatacggcgcgcaggtatacagtaacgttcagtggcaaggttttggcaaacagcggcagcgagcgcagcaatacgctaccggtgactacattttgatgatcgatgccgatgagcgcgtcacacctgaattaaaagcctctatcgacgtggtattagcgtctccggatgatgatgccgtgtatagctgcggccgcagaaatctgtttttggggcgttttatgcgccatagcggctggtatccggatcgggtgacgcgtctgtatgctcatcatcgatatcaatataacgataacctggtgcatgaatctgttgatgccggaaatgcgaaagttattccgctgaaaggggatttactgcacttaacctgtcgtgatttttttgcttttcagcgtaaacaactcagctacgccgaggcttgggctacacaacgccaccaacaaggtaaaagctgtagttatttctctattcttagccatactctcggcgctttttgcaagacctggctgttccgcgccggatttttggatggtaaacaagggttattgctggccgtagttaatgcgcaatatactttcaataaatacgccgccctgtgggcactcaaccaaaaataacgcaaaagcgagacgccatgatcaccagagccatttatccgggcacctttgatcctatgaccaacggtcatctggatttagtcactcgtgcgtcttccatgtttggccatgtcattttggccattgccgatagttcacataaaaaaccgatgttcacactggatgagcgcgttgcattagccagcgaagtgacagcgcatttgaccaacgtggaagtgatcggttttagcgaattgatggcaaccttcgcccagcagcataaagcgaatattctggttcggggtttgcgctcggtatcggatttcgaatatgaatggcagttagcgaatatgaatcgtcatttgatgcctacgctggaaagcgtatttttactgccatcagagaaatggtcattcatttcctcttcgttagtaaaagaagtggcgcgtcacggcggcgatatcacaccattccttcccgcgccaattaccaaggctttactggataaactctgagtttacctctgatttaatgctggcagtgacggcagaaaaacgtgctgcgctgcccatgtttcgcactttcaatcagatgaccacagcgcctgcacggctcaccggctcgaccataaacctgtaattcctgcgcaaagtaccccggtttgccatccgactgcaaaaaatcacgtagcgttgtgccgccctgctcgatagcgcgcagcaataccattttgatagttgcaactaataatccgacttctgcttcagttagcgaacccgctgggcgatcgggagcaataccggcgacgaacagcgattcactggcatagatattccccacacccaccacaactttattatccataatccactgtttaaccaaggttcgcttattgcgagacaggttaaacaggtaggaagcgctaaattcatcgcttaacggctcagggccgagatgagccagcacgttgctggttgccaaatccgaagcccatagccatgcaccaaagcggcgcgggtcggtatagcgtaatattttgccgttactgatcaccaaatccacatggtcatgtttttctgcctcggtttcctccggcaaaatccgcaaactgcctgacatacccaaatgaatgataatccagccttttggcaattccagtaacagatatttggcacggcgttgcacactcagtaccagttgatcgctcagagccagtatttcatctgaaaccggccagcgcagacgggaatttctgacgatggcatattgaatgctgtggccgaccaggtagggttcaatcccacgtcgactggtttcaacttctggtaattcaggcatttaacctccgattcaacgtgtttaccgacctttatataacaaaaaacccggccgaagccgggttttttattaatccactaaaattatttaattttagcttctttgtagatcacgtgttgacggacaactggatcgaatttcttcagttccaatttttccggcttagtacgcttgttcttcgtggtggtatagaagtgaccagtaccagcagaagaaaccagcttgatcttctcgcgaacacctttagccatgattcagttccttaatacttctcaccgcgggcacgaagttcggccaagaccgtttcgatacccttcttatcaataacacgcatacctttagcagatacacgcagagttacaaagcgcttctcgccctcaacccaaaaacggtgagagtgcaggttcggcagaaaacggcgtttggtcgcgttcattgcgtgggaacggttgttaccgctcaccgggcgcttgccagtaacttggcagactcgggacatgtctattctccaaaaatcaaatcagctcgagcttcgtatagggtatggccgcctcgtcaggctttagagcccatctcagcaaattcactgagaagactcaatgtcatcaggtcagaaacccctgtcaccaggtataaacctgctgagataggctcttcacgccaaacccaagattctcaaaggtggcgtagtatacgctctgaagcgtaagtgctcaagtcccgaacagctaaagatcccgaaaggatcgagaaaatatctctaaatccagcctcgttcagcaaaagagacacattcgccacggccaaccactaaatggtcgagcaccctaatatctaataatgagcaggcttttaccacctgcgcagtgattaaacggtcggcttggctcggttcagccttccccgacgggtgattatgcgccagaatcaacgcaacagcattaacctttagcgcttcacgcacaatttcccgtggatggacctctacgctggtgatggtaccagtaaacatctcctcatggcgaataacacgatgctggttatccaaaaacatcactaaaaatatttcccgctcacgttctgacagcaaattttgcaggtatttttgcgtcattcgcggatttaacatcgcattctctttagtcatatggtcagaaaaacatctggtggccaattcggaaatggcatgaatctgactatatttagattttcccatgcctttttgtgcacaaagcgtcggataatccgccgacatcaaacgatatagagagccaaattcggcaattaggtgctccgccatcgccatcacatgcagacccggaatgcccgttcgtaaaaatatggccagcaattcagcatcacttaacgcctcagcgccatacttcagtaatttttctctgggtccatcccctttcagccatagttccatcctagaactcccctattctcaatgccggagtatcatgccatggccggattatcctcacgacaagcatcaataaatcctgcgtgacgccacgcaaatttcagattgatcgctaacctacgttgccccctatagcaaaactgccgatgggttatgctaaaatatcgcctctttcggctttcattcggacaatcatgatgacgggactttccggcaaacatattgtgctcggtatcagtggtggcatagccgcctacaaatgtcccgagctagtacgccgcttacgcgataaaggcgcagacgtgcgggtagtgatgacaacggctgccaaagcctttatcactccgctaaccttgcaggccgtttcgggatatcccgtctctgatgatttgctcgatcctgccgcagaagccgctatgggccatatcgagctggggaaatgggccgatctggtcatcatcgctccggccaccgccgatttactggctagagtggctgcaggcatggccaacgacctgctgacaacgctttgtctggcaaccgcagccccagttgccgccgttcccgcaatgaatcagcagatgtaccgcgcgagcgctacacaggccaacctgcaaacgctgggaagccgtggcgttttgctttggggaccggacagcggtagtcaggcctgtggcgatatcggccctggccgcatgcttgacccattggaaatcgtggcattggcggaaaatcatttttctgtaaaacaagatctgcaacatcttcatgtcatggtgaccgccggtcctactcgtgaagcgctggatccggtacgttttatcagtaaccacagttcagggaaaatggggttcgccatcgctcaggcggcagcgcagcgcggcgctcacgtcactttagtcgctgggccggtcaatctgccaacgcctgccggagtcacgcgcattgatgtgattagcgctcttgaaatgcaaagcgccgttcagcaagccgcccctcatcagaatatttttatttcctgtgcggccgtagcggattaccgggcggaacaggttgctgatgaaaaaataaaaaaacagggtgatgaaatcacgctgaaaatggtgaagaatccagatattgttgctggcgtcgccgcaatgacgaaaaaacgtccatttgtcgtcgggtttgctgccgaaacccagaatgtggaagaatatgcgcgacaaaaactggtgcggaagaatctggacctgatttgcgccaatgatgtttcgctcgcagagcatggttttaatagtgataccaatgcattgcaccttttttggccgaacggagagaaacgcttgccccacagcgataaatccctgcttggtcagcgtttaatagacgagattgtcagccgttatgatgaaaaaaatcgacgttaaaattctgaatccacgtattggcaccgaatttccattgccgacctacgccacacctggctcagctggcttggatctacgtgcctgcctggatagcgcagtagacctggctccggggcaaacgactctgctgccaaccggtctggctatccacattggcgatactggtctggcggcggtaattctgccgcgctcaggtttaggccataagcacggcgtggtgttaggtaatctggtcggcttgatcgactccgattatcaggggcaactgatggtttccgtgtggaaccgtggccagcagtctttcactatcgaaccgggcgaacgtattgcccagatggtgtttgtgcctgtagtacaagccgagttcaatctggtcgaagattttgacctcagcgaacgcggcaccggtggttttggtcattctggacgccaataacctaccctaaacctcgataccgtaaaaaagctatcacataagccgcctgggcattgtatccagcgcggccggtgttcaggtttttgttaattaagtcatttttagcaagggtctaatcggacatggcagagaaagaaaatacgaaaaggaatcggcgcgaggaaatattgcaagctttggcgcaaatgctggaatccagcgatggcagccagcggatcaccaccgcgaagcttgccgccaacgttggtgtttctgaggctgcgctatatcggcatttccccagcaaaaccaagatgttcgatagcctgatcgagtttattgaagatagtcttatgtcccgcattaatttaattctgcaagacgaaaaagaaacttttaatcgtctcaggcttattctattgctggttcttgggtttgccgaacgcaatccagggctaacccgaattatgaccggacatgctttgatgtttgagcaggatcgtttacagggccggattaatcagctatttgaacgtattgaagctcagctacgtcaggtattacgagaaagaaagctacgggaaggtcagggctttgcacatgatgaaaccctgctggcgacgcaattgctggctttttgtgaagggatgctgtctcgctttgttcgctccgaattccgctatttgccaacgcaagagttcgatgcccgctggccgctagtgatggcgcaattacaataggtgacggccaatagtcagtcaccgcaaaaagtaaaaagggccaattggccctttcgtctttgcactttgttttcagcaaaatggcttaaacgccgtaattctcgcgataaacacgaaccgcggccagatgatcggccatttccggtttttcttccagataggtaatcaaatcattcaaagtcacgatagaaatgactttgcagtgataatcccgttccacttcctgaatagctgaaatttcaccgcggccacgttcctgacggtctaacgaaatcatcacgcccgccagagaagcgccctgcgcgccgataatctccatggactcacgaatagcggtacccgcggtaatcacatcatcaaccagcatcacacgcccttgtaacgggcttcccaccaggctgccaccttcaccgtgatctttcgcttccttacgattaaagcagtaaggaacatcgcgctgatggtgttctgccaatgctaccgccgttgtggtagcaataggaatccccttgtacgcagggccaaacagcagatcaaactctacgccacaatccatcagggctgccgcataaaaacgccccaataacgccagatccagcccggtgttaaacagtcctgcattaaagaagtaaggactgatccgccctgacttcagggtaaactcgccgaacttcaaaacctgtttgttaagcgcaaactcaataaaatcgcgctgataggctttcattggtgtatctcctttccagattagtgactgctgtggtcagttaccgcatctatcctcgataaaatgctctcaggcaaccgggtataaaaaaggcgactatcaggtcgcctttataaaaattattgttccaacgccgctttctgcgcctggaagatggtttctattcctccccgcgccaaagccagcaacgccagcaactcttcatggctgaacggttcgccttctgcggtgccttgcacctcaatcattcgaccatcttccatcatcaccacgttcatatcggtttctgctgcagaatcttccacatattccaaatcgcacagggcctcaccttttacgataccgacagagacagcggcgaccagccctttcatcgggttagctttcagtttacctttggcaaccaatgcattaagcgcatcggccagtgccacacaggcaccggagatagacgcagtacgagtgccaccgtcagcctgaatcacgtcgcagtctaaagtgatggtgaattcacccagttttttcagatctaccgccgcacgcagtgagcgggcgatcagacgctggatttccaatgtacggccaccctgcttgcctttagcggcttcgcgcgggttacggctatgcgttgcacgcggcaacataccgtattcagcggtgatccacccttgtccctgccctttaagaaaacgcggtacgccttcttcaacggtcgcggtgcacaatactttggtatcgccaaactcaaccaacacggaaccttcagcgtgtttcgtataattacgggtcagggttaatggacgtacttgttctagtgctcggcctgctgggcgcatgggaattctccggcgttaaatcgatattggtcgcgcattatacggccttagtgatgtaatgcctatcctgcctgaggctgcgaggctataatccctgcatcttttctttgaaacgggtacgcaacgatgatccgcagcatgaccgcctacgcccggcgtgatattaagggtgaatggggcagcgcagcctgggagctgcgttccgttaaccaacgttatctagaaacctacattcgcctgccagaacagttccgcagtctggaaccggtcattcgcgagcgtattcgctcccgtctgactcgaggcaaaattgaatgccatctgcgcttcgagatggatcctacagcacaaagttcactgatcctgaacgaaaaactggctaaacagctggttgaagcggcgaactgggtcaaaatgcaaagcgacgaaggcgaagtcaatccgctggatgtgctgcgctggccgggagtgatgtctgctgaagaacaggatttggatgctattagcaccgaactgatgcaagcgctggatattgctctcgatgactttattgttgcccgcgaatctgaaggtgcagcgctgaaagccatgattgagcagcgcctggatggcgtaagcgcagaagtggttaaagtccgagctcatatgccaaacatcttgcagtggcagcgtgagcgtctgctaagcaaattggaagaagcacaggttcaactggaaaacacccgtctggagcaagagttggtgctgatggcgcagcgtgtcgatgtcgctgaagagctggatcgcctggaagctcacgtgagagaaacgcataatattctaaagaagaaagaggccgttggtcgccgtcttgattttatgatgcaagaattcaaccgtgaatcgaacacgctagcgtcaaaatctattaatgcggaagtcaccaattcagcaattgaactgaaagtacttatagagcaaatgcgcgagcagattcagaatatcgagtaacttctcaccgcatggcaagataatagaaagcctctaaagcccgtaatctggactgaccctataaaaagttggacagtccagattacgggctcattaatatccagattgactttattcaccgataaaacgtaagttccaattaaatacgctgtagttaaacatgtagcgtatggcgacatacgtaataatcagggtagcgacgacagcctcaaaggtagccagataataaagttggtagctgtaatcttgtactaattcatacttgctcaccaaatccgctaatttatataacgctgtcgcaccaattgccattgggaaggtaaacgcagcataacccgggctaaacggcaattttagtaaacggaagaatgacatgtaaattacgcaagtcattaatatcgcaataccgaacagtaatgcacataccagtaaagaaggatttggcactacggttaaataacctgccaaactaaggctcgcaggagcagccataatcgcaatggttggcttcgctgcatccggaacttcgcggcagaacataaaacgatagatcatcagcggcagcatacatgcgtaactcaacataccgatgactaacaataaatacgcaacacccataaaggcctgattaggcaccgcaacgtcagccacaataatcccaacgggcggaacaaaccaactcggcaccatatgatgcatttctatttcttggatccgatgataaataaataccgcaagaaaaatcaggtgcactactaccgccagtgaccacaagatctcacccgccaacatactcaaattgcccaaggctttggaaaccaccatacaccccatggtaaaggtaggaaccacgctacccaccacaggatgttttaaatctgataataaaactctgaagtgaaaaataaatttactggctacggcaagtagcagcaccgatgcgattatcgccccgatattttgacctaaaccgtttaagggtaatgcattttccaggcaccaacctatacttgaaatacccagtgccagaccggcgataggcgtcggtaatcctctgattttactatgtataatttctaacatgttaccgccaaaagcataatctacataaatgaatagggcaaatatagatactcacctttgtttaggatatcctttttttattgacttagcgtttagaagaaataaacaaatggatatcacgttgaagcaattgaaagttttcctagcggtagcgcaaagcggcaatttaacggtcgcagcctcccaattgtttatgacgaaaggagctgtctctcaaaccttggctgagttagaaaaacgtctgggccaaaccctattcgatcgtcaccacgctcgtatatttattaatccggagggggaaaaattaatctcagtggctgatgagctgctttcaagaatgaaagacatcaatacattattttccgacagcgccagcgttcacaatttatttttgggttgtagtaaaaccattggcagctatattttgcctgcacttttaggtgagtttagaaatagctataactggttgcctaaaatagctattgaaaacactaacgatattctgagtaagttactcaaatttgaagtagatttggctattcttgagggaaatatcaataataaagatatcttgtctaccccatggttaacagatgaaatggtcgttatcgcaaccaaagatcaccctctcgcatacgaaaaatcagtcccgttctcagtattgagtcagcagtcatggatattgcgtgagcaaggttcgggtagccgcagttattttgaaaatcatctggcaccattgttattgcagccgaaggtcattttatctttggatactttcgattcaattttattttctgttcaacaaaatttgggaatcacctacgcttcccggcttatcatccaaaatcctttttttcacgaccatttctcagtaatcaaaacagaaacccgttttttccgctcgataagcctctgccaccatcgacaaaaatatctatctaatggtgctcaacagtggatcaattttctgattcatgcaggtaaacgacttgagtttgcacgaaataatcagatagagaattgattattagttatgtccaaaactggatataaaatagcaaaaaatattacctgtattctcaaaattcataggccagataagggatatcccatcttcggtaagtcagtaatattcgaattctttggaagatctcggtcaattagtttgtttataaaagcagcataattaataaatcagcaacaaaaaaatgaaccagtagtatctatggctaaattaataatcttaatcgatattaaatttatctttaagccaaaaagatcgtagaataatctatagagaaccaatggaaaaacctgtcaaaaaggcgtgtttcaaacgctgatttattgctctttattgcattaggattttaggtaaccaaataaaaaataatgtttttctccaagtattcctcccaatcaatctgtgtcagtctacaaatccgtaggcctaaaggcaattcgttcatttacggctactatttatggtcaggcagagtaagaaattaaataaacattttattggcttgagcctaatcatcctgcactactattaatcagtacggcagattatcactatgacagggcatgtcttggcgaaatgtatcttttcatacaggttgctgtatccaagatgcatatgaacttttcggggtatctctcatgttcgtagatcaagacacatcgatcctggacacttactttggcacccatagcccctattggcgcttggcttttgatagccaagccttggaactctccgccgtaaaaggcacgaccaatattgccgttcctcttgattcacttcaaacagcgaaagtccgcgcactgacagccattacttccagcctggaaatcagtatttctatctatggcaatccagttcatttgcatctggtaggacgaaaaattaatgacaaggaatggggaggaacagcttcagcatattcagatactgaagctgtcgcgcgcgatctggtgatgggattgtcctttgccgaacaagtcgtttccgaagctaactcggttattgtcattctggataaaaatggctccgtacaacgctttaatcgtttgagtgaagaatacactggcaaaaaagaacaagacgtcatcggtaagaatgtttttgaattatttatgacacagaaagaaggcgcatcctcgcgtaaaaacattgaaggtttttttaaaagaggtgcttcttatgaagtggaacgctgggttaacacggtaaaaggaaaacgcctgtttctttttcgtaataaattcgtgcacagcggcagcggtaaaaacgaactttatttaatctgctcaggtacagatattactaaagagagacgagcacaggaacgcctgcgtgtgctggcgaataccgatatgattaccggtttgcctaaccgccacgctattcatgagcgaatcaacagtgcgattcaaactcgcggagacgacgccgtagggattatttatcttgatctggataacttcaaaagagttaacgaccactatggccatatgtttggcgatcggctgctaaaagatgtgtcactttcgatattgagctgcttgaaagaagatgaaatgctcgcccgtttggggggagatgagtttatcgttcttattgaagatacgacgctttctgccctcgaaaatgccgcccaacgtattctcgaccaaatgcgagcccccttccgtatcggattgattgaagtttataccggatgttccattgggattgcgttatgcccacagcatggcgaaacgctggaaaatatcatccgcagcgcggataccgcgatgtacacggcaaaagaacttggcaaacggacttattctgtcttttctccggaaatgaataagaaagtgtctgaatacatttggctggataccaatctgcgtaaaggcctggaacaacatcagcttgtcgtattttatcagccaaaaatctcaactcgaaccggtaaagtcctcagcgtagaagcattagttcgctggcgatcaaccgagcggggtttagttccaccgcaagagtttatctcatatgcggaagaatccggtttgattgctcctttgggtcaatgggtattacaaacggctatgcagcaagccgttgactggcaaaagaaaggcatagatttaagaattgcagtcaatgtttcagcccgccagttggtgaatgaagcgattattaccagctttattaaatcgctggaaacctgtgaattgacctccagcttagttgatgtcgaattaacagaaagctgtctgattgatgatgaaaatgcagcgattaacattatcaaaaagctcaaagaattgggtgctgaagtccatctggatgattttggtaccggctattcttcactttcccagttagcacgtattcctattgatgcaattaaattagatcagagctttgtgcgcggaatagataaaaatcaggtcgcgcagtctttagttaaggcaatctccgttgtcgccgaaacgctccaaatgcgagttattgcagaaggcgttgaaacaatagaggaagagaatttcctagatttgttgagcatagatgaaaagcagggatttctttatgccaagccaatgcccgcagaagaactggagcattggctgagcaaacataccccgcactttccaagtaatttaacgggaaaaacctaacctaaatcgcttttggcatggtggatgtacgccgatcctgtagcatgaccaggcgttcaatataagccagatctttagcttcgatggagaaaacagagtccacccaatcttcggttatatccatcaattctgaacgcgtcagctgcaaaacgcgttggcgtgttcgtatcattgcgcgcataccgtttaattttggtcgaatagtatcaatgaaggtgcgagtagccatataagcatcccccggctgaaataatttatccaccaatccgcgactttcataccattctgccgcatgtgattccccgctccagataagctcctcggcaacacgcataccggcttttctagccaccagcgagtatcctcccatgcctgggaacagattaaaggctatttccggaaaccccattcgggcagtggtctgcgctaaaacaaagtgatgtgccagcgcagcttcaaaaccaccacctaaagcgctaccttcaatcatggcgattgagattgctccggtatcaaacccgcgggaggcggaatgaacgcaatccacgcaggctctagcgtaagccattaatgtttcacgcttgcggttttttatcatctgagcaaagaaacttaaatcacctccaacattaaacatatgtggaacaaccgaacctgtaacccagaagtcgataggcagttttgactcttttgctgcctgcgccagtgtcataatattttcaattaactcaaggttaaaacacggacgtggattcgctcgtaacagcatccacatggtatttcgctcttcttcataataagcagagacttgcgatagatgcccagcttcggtaaatgggcggcagcttgggagattaatcattttcatatattccatccaataagtgatttcaacacaggtaagcctctcggctaattcagcttgcttgaggtcgatttcccctcaaataaggcaagcaaataaatagtgagtcactggatgaaaaaagggaggatatatcgatatataaaagaataatggtcagttagatacgacatttaaatataaaaacacagttttaaaatccaccctcggaaattttgttggcattttctacatcgcaacaggctttaatcgaattagttttatacttctttggcttgtaaattaatctattcaatctaataaagcccaacattgaggttatttttatgtgaaagttataagacattatggatagaatgctgaaatattttcacttaacgttaaatgggctttgtatgctgcaaatactacattttcttttggctttgataatcatcacgctactggccttagccgcgagcaatgatcgcaagcagattcgcctacggtatattcttcaacttttagctattgaaattgcctttgcctactttttactgcattccgacattgggcttggcgcgattcaacacttcgctggtttctttgaaacgttgatgaaatttgccgcaattggtaccagcttcgtatttggtaatatgaacgaacaaggtctcgcgtttatatttctcaatgttttatgcccgattgtttttgtttcagctttaataggaatattgcaacatttccggatcttgccttgggtaattcgcggtataggtacggtgctttcaaaagtaaacggtatgggaaagcttgaatctttcaatgctgtgagcaccttggttctcggccaatcagaaaactttatcgtctataaaggcgtgattgccgatatttctcagcgccgtatgtatacgctcgccgctacggccatgtcgactgtttcgatgtcaatcgtcagcgcatatatgacaatgttagagccgaagtttgttgtggcagccttaatactcaacatgttcagcacattcattgttctttccattatcaacccttacccaacgggcgatgagcctgagataaaattaaataagctacatgatgatcaaagtttctttgagatgttaggggaatacatcctggctggatttaaaatcgccattatcatcgccgcaatgctgattggttttattgcgctaatcgccgctattaatgctttgtttaccagcatatttagcgttagcttccaggagattctcggctatgtattctacccccttgcctggctaataggtattccagcgccggatgcgctaaaggcaggcagtattatggcgaccaaattagtgtctaacgaattcgttgccatgatcgagcttaaaaaaatagcgattgatatgtccccgcgtggcctaggcattctatcggtgtttctggtctcttttgctaactttgcctcaatcggcattatcgccggcgcgattaaagggttgaatgaaaaacagggcaatgtggtttcccgtttcgggctgaagctagtttatggctctacattggttagtttattatcagcaacaatcgctggtttagtgctttgatgaaacggttggccttagagtgcaatgcctgaaggccagccatcattgaagattaaaaatcgacacagacgggcgcatcaatacgcattactgactcttgtgaaaactgcgccttgtacttatctctcagcaagttaaccgcgagatcactgtctttgctttcggcatgaatcagcatcagcgctttgctattttcttttgctactatcccgtcatgccccagccattgccctttggcttcaaacacggttaatccgtctttaaatttcggagtaacctctgagtcaacaaatgattgccactcagcgggagcaatcaccgggccttgcgggcgattcataccgaaataaagcgttgtttgcaccataggaacaccctgctgacaaacagagggaacagcctttatcgtagccgaattcgccgctgactcaggacgtataacgcatccgtttaaaataaaccccgaagcaattattcctagaataaagccggcacgccgacataagtaatttctgctgttatccatatagataggattctctttagaatagaaaatgacgctgcatgaaattagcatttagcggctaactgctgcaatggcgaaatcattacgccattacgccattacgccattacgccattacgccattacgccattacgccattacgccattacgccattacgccattacgccattacgccattacgccattacgccatgcagagtttaaataatctaactcacccatcaatagaaataataaccaaccactgtaatacatagcataaaaccccacatcggattaataaatctaatgcaaaacatacagggttagaaaatctcagtcgcgtttgaattgtgcggccattacccttgatcttttgccgcccccttgtgtgaaagactatgttacttagcgttctctatattattggtattaccgcagaagctatgaccggcgcgctagcagcaggccgtcgccaaatggacatgtttggcgtcattattatcgcctccgccacggcaattggcggtggttcagtcagggatatgttgttagggcattatccgctgggttgggtcaaaaatcctgaatacatcgttatcgttgctatcgccgcaatagtaaccacctgggtagcacctctgatgcgccatttacgtcaccttttcctggtacttgatgctatcggcctcatcgttttctcaattatcggagcacaaattgcgttagatatgggccatagctctatcattgccgctatcgctgcagtcattaccggtgtctttggtggcgtacttcgtgatatgctttgtaactgtattcccttagtttttcagaaagaaatctatgctggagtatcctttgccgcagcatggatttatatcgctctacagtacacgccgctttctcataattgggttgtcatcattacattggttactggcctgactgcccggctgcttgctttgcgttaccgtttaggattacccgtctttaaatatgagcatcaggatcattgattctctgtagctgctagcgctctataaattcaaacccctttatttgatggtgcgacaacgtagctacaagttgccgcacctccgaatcagcggcaaatgccattatttgttttacacgcttcttacctatattcgccaaagatagccattcttggttcgagcgccgtaataaatctgtccagcgttctggatagtcttcttttttagctagcttggggaaacccaacgccgccaaccactcgccaaacggccgctctcttgctacctgaaactgttgataaatcgtctttgctttcgccgctcctatacctggtacagcggcaatatcatccggtgtaaattcaagccattcaacgagattactcatcaagccatggtcgataaaggcctgccaaacacccgtactaatacctgccatattcagtcctgaacggctacttaaccaactcaaacgggcaataaattgctcattacaagaagcgggttgacggcgaaaacagcttaacgaatgaaataaagcggaatcgggggggttaacgacatgccgattctccactcgccagacaacgttatccaagcgagggataccttgccccgctaacgaaactgttatttgatcgccgggaatgacgtcccagtaccgccagcgttcaaccgatccaacattgacatttttcacccatttgtcatccagccgaataggctctagagataaaatagcgctgaccttccctgttcggcctatggtgaaattaactgatttcacctgcgtgacttgctgaaagggagagtatttccaggcaatagaccagtaaccgggctgtgattgccaatgatgccccgcaggttcttgctcttgccggataacaattccgtcggtcacaaatggcaacggtgattcaaaccagcgttgtcgccatgcaacaatatcactcgctgaagtgaccggcatactgaactctttagtcagcgaaaatcccatccgccgtaactcacgcagcttctcggtcataatcgcgggtccatcaggccatgcccaaatgaaaatacctatatcggacaacaatgccgaaggtgactttttcatcattgctcccgccaccaaagcccgggcattaataccgccagcttctttctgtttatggtgagttacctttaggaaaagttcgccgtgcaggaccagtaacggcggagcctgagaaataaagtggggaattgcaggtatatatttcactttatccgtccagttctggcctactgcaccgtcgcctcggctgatcgcttgcgtcaggtttccttgaacataggttaacgtgaccgcgacaccatcaactttaggctgaacccaaaggttttttcgttcggcgagccattcagataaagcccctttcccatggagtttttttaatcccgtatgagcaacgggatgagataatctattctgcaaactgatggtaggagaaagagcgttattaactcttttctcgggtattgctatgcatcgcacccagtgattgagccgatacctaagctgatcgtaaatatcatcttcaatcaggctattaccctgttgaaaataagcgacatcccattcttctagttgcttttccagtctggagatctctgtttcgaattcgctgagcgtccatgacgggcaatctaccgaagctgacgatctgccatagaaaatagaaaccaagagcatccccaatatgattaacttatccatgttctttccctcgccgtccttggtgaacatgagttaatccgctagcaacgaataattaaatagcccaaaagtgaaaatgcggcacatctcgaaaaatacttttttcgttactgcaacaacttgaaattgctgaatcccctacgcaaagtatgtaatttgagctttttaaatacgaaaccttgtagtgaaatgtgttgtaacgctgcatgacgcggttagcccgtgtatactgtgcgaagattcacacttctgctttttatacatcaaccctaatcaactgaaacgtcatcatggttcaaggcacgctatacattgtttccgctccaagtggggctggaaaatcaagcctgattcaggctttactgaaaacacagccgttgtacgacacgcaggtatccatttcgcatactacgcgtgcaaaacgtcccggtgaaaatcatggtgagcattactattttgtttccgaacaagagttttgccagatgattgaggatgatgccttccttgagcatgccaaagtttttgaaaactactacggcacctcacgtttggccatcgagcaaactctgtctaccggcgttgatgtctttttagatattgactggcaaggtgcacagcaaattcgtaaaaagatgccggcagcgcgcagtatatttattctgcctccttcaaaagacgagctggatcgtcgtttacgaggccgtgggcaggatagcgaagaggttattgccaaacgaatggcacaggccgtcgcagaaatggatcactacgcggaatacgattatttaatcgtaaatgatgatttcgatttggcattgtccgatttgaaaaccattattcgcgccgaacgactgcgtttagaccgccaaaaacagcggcatgacgctttaatcagcaaattattggcagactgaaccgagtttcagtatcatgcccagtcatttcttcacctgtggagtagcagaattatggcacgcgtaactgttcaagacgctgtagagaaaattggtaaccgttttgacctggtgttggtcgctgctcgtcgggcgcgccaaatccagtctggcggtaaagatgcactggttccagaagaaaacgataaagttaccgttatcgcactgcgtgaaatcgaagaaggcctgatcactaatcagatccttgatgttcgtgaacgccaagagcagcaagagcaagaagccgcagaaattcaagcggttactgccattgccgaaggtcgtcgttaattagtaattagactgtgagtctgccttgtacctgtttgaaagcctgaatctgctgattcaacgttacctgccagaggagcagattaagcgcctcaaacaggcatatcttgttgcgcgtgatgctcacgagggtcagacacgctccagcggtgagccttatattactcacccggttgccgtggcctgtatcctggcggaaatgcgactcgactacgaaaccctgatggcggcgttattgcatgacgtcatcgaagacacgcctgcgacatatcaagatatggagcaactgttcgggaaaagcgtagctgagttggtcgagggcgtatccaaactcgataaattaaccttccgcgacaagaaagaggcccaggcggaaaacttccgcaaaatgatcatggcgatggtgcaggatatccgcgtcattttgatcaaactggcagaccgcacgcacaatatgcgcactctgggttctttacgcccagataaacgccgccgcatagctcgtgaaaccctcgaaatttatagccctttagcccatcgtttgggtattcatcatttgaaaaccgagcttgaagagctgggttttgaagcgctatatcccaatcgctaccgcgtcatcaaagaagtggtaaaagccgctcgcggtaaccgtaaggaaatgattcaaaaaatcctgtcggagattgagggtaggttaaccgaagcgggtataccttgccgggtcagtggacgtgaaaaacacctctattcgatctattgcaagatgaatcttaaagagcaacgttttcactccattatggatatctatgcttttcgcgtcattgtgaaagaagtggatacctgttaccgggttttaggccaggctcatagcctgtacaagccgcgccccggcagagtaaaagactacattgccattcccaaagctaacggttatcaatcgttacatacctcattaattggccctcacggcgttcctgtcgaagtacaaattcgtactgaagatatggaccaaatggccgaaatgggtgttgccgcacactgggcttataaagaacagggcgaatccggcaccacggctcaaatccgcgcccagcgctggatgcagagcctgctggaattacagcaaagcgcgggcagctcatttgaatttatcgaaagcgtaaaatccgatctgttccccgatgaaatttacgttttcaccccagaaggtcgcatcgtcgaactaccggcgggcgcaacgccggtagacttcgcctacgcggtacacaccgacattggccatgcctgcgtcggtgcccgtgtagaccgccagccttaccctctttcgcaggcgcttagcagcggccaaaccgttgagattattaccgctccgggagcccgccctaacgctgcatggctgaattttgttgtgagttcaaaagccagggccaaaattcgtcagttgctgaaaaacctgaaacgcgatgagtccgttagccttggccgacgtttactgaatcacgctttgggcaatggccgtaagttggcagatatttctccggaaaatatccagcacgaactggatcgcatgaaactggcatcggtagacgatctgctggctgaaatcggtttaggcaatgccatgagcgtagtggttgcgaaaaatctactgggtgaccctgctaatatcgccgcgtcaggcaccagaaaactgccaattaaaggcgctgatggtgtgttgattaccttcgctaagtgttgcagacctattccgggcgacccgatcattgcgcatattagcccaggcaaaggcttggtgattcaccatgaatcctgtcggaatatccgtggctatcagaaagagccagagaaattcatggcggttgaatgggataaagtcaccgagcaagaatttattgccgaaattaaagtcgacatgttcaatcagcaaggcgctctggctaacctaactgcggctattaatgcggctgaatcaaacattcagagtatgaataccgaagagaaagatggccgaatctacagcgcctttattcgcctgacaacgcgagatcgtatccatttggcgaatattatgcgtaaaattcgtatcatgccggacgtagtcaaagtcagccgtaaccgcaattaaggcctatgaatccccaacgctatgcgcggatttgtgaaatgcttgccaccagacagccggatttaaccgtctgtctggagcaagtacataaaccccacaatgtttccgcaatcattcgtaccgctgatgccgtaggcattcatcaaatccatgcaatttggcccaccgcagaaatgaataccctgctgtctgctgccgctggcagcaatagttgggttcaggttaaaacacatcccgaaattagcggtgcggtccaacatttcaaaacccagggtatgcagattctggcgacacatctttctgataacgccgttgatttcagagaaattgattacactcgcccaacctgtattctgatggggcaggaaaaaaccggtatttcaaaagaggccttagcgctggccgatcgcgatatcattattccgatgatcgggatggtgcaatctctaaacgtttccgttgcctctgcgttgattctgtacgaagctcagcgacagcggcaaaatgccggaatgtatcagcgtgcagctagcgtgttggataaagatgagcagcaacggctgctgttcgaaggcggttatccggttttggcacaggttgccaaacgcaagggtctgcctcctcctcatatcgatgagcatggccagattattgccgagccgcaatggtggtctgctatgcaagcaacggagtcgtaaatgaaaggccacctgctcgatgccgttcccctgagtacactctccggcgttggcgcaagtcaggctggcaagttggcgaaaatggggctggaaaccattcaggatctgttgctccatctacctctgcgttacgaagaccgcacccgcctttatcgtatcggtgacctgctacctggcatttttgcaaccgtggaaggcgaagtgctgcgctctgatattagctttggccgccgtcgaatgctgacctgtcagataagcgacggcagcggtattcttaccctacgcttcttcaattttaacgctgcgatgaaaaacagcctgtcccccggcaagcatgttatcgcctatggagaagctaagcgcggcaaccacgggccggaaatcattcatccggaatatcgagtacatggagaaaatacgggtattgaattacaagagtctctgactccagtttatcccacgactgaaggtattcgtcaggcaacgctgcgtaagctcatcgatcaggcactagccttacttgatatcagcgctatcgcagagttactgccgcaggaactcagccgcacgcttatcagtttgccagatgctattcataccctgcatcgcccaccagcagatattcagttaaccgatctggagcaagggaaacatccggcacagcgccgattaatattggaagaactgctggctcataatctcagtatgctggctgtacgggcgggagcacaaagctacaaggctttgccgttgctcgctgaagaacagctaaaacaacgttttctggctaatctcccctttaaaccaacctctgctcaacaaagggttgtgggtgaaattgaacaagatctgactaaccctttccccatgatgcgattgattcagggtgacgtgggctcgggtaaaacactggttgccgctctggcggcgctgcgggctatcgctcatggcaagcaggtcgcgctgatggcaccgacggaattattagcagaacagcacgcaaataccttccgtcagtggttcgaaccactggggctggaagtcggctggctggctggtaaacagaaaggcaaggcgcggctggcacagcaggaagccgttgccagtggacgggtttccatggtggtgggtactcacgctatctttcaggaacaggtgcagttctcagggctggcgctggttattattgatgaacaacatcggtttggtgttcatcagcgtttggcgttatgggaaaaaggcgaggaacaaggtttccatcctcatcagttgattatgaccgccaccccaattcctcgcacattggcgatgaccgcatatgctgatttagatacttcggttattgatgaattacctccgggaagaacgccggtcactaccgttgccattccggatacccggcgcagcgatattattgccagggtgaaaaacgcctgtctggaagaaggccgtcaggcttattgggtctgcacgttgattgaagaatcagaattactggaagcgcaagcagcggaagtgacctgcgaggagttgaaagcagccctgccggagataaaagtcggtttagtacatggccgaatgaaagccgcggaaaaacaatcggttatgcaatcattcaaacaaggggaattgcagctgctggttgcaaccacggtgattgaagtgggtgtcgatgtccctaacgccagcctgatgattattgataacccggagcgcctcggtttagctcagttgcaccagctgcgtggtcgggtcgggcgcggtgcagtggcctctcactgtgtgctgctgtataaaactccgctcagtaaaacggctcaaatgcgcttgcaggttttacgagacagtaacgatgggtttgttattgcgcagaaagacttggaaatacgcggccccggcgaattattaggtacgcggcaaaccggtagtgcagagttcaaagttgctgatttaatgagagatcaggctatgttgcctgaggttcagcgcattgcccgtcaccttcaacagcaatatcctgaaagtgcaaaagcgctgattgaacgttggctgccagagcgatctcgctacaccaacgcttaaatattataagggaaagccattgcggctttccctttaaacaccgactttagcccgcaactgctgggaatattggcagcaacagataaagttttatcacaatcgcattgacgatatcgatgaagaaagcaccaaccattggcacaaccaagaatgccaaatgagaagggccgaaacgatcggtaatcgcctgcatattagcgattgccgtcggcgtcgcgcctaagccgaaaccacagtgacccgcagccaacacagccgcatcatagtttttacccatcactcggtaagtcacaaagattgcgtatagcgccatcgccaacgcctgaaccaccagaataaccagcattggtaaagccagggaagccagctcccaaagtttgaggctcatcagcgccattgccaaaaacagcgacaaactgacgttacccagcacggaaaccgcacggtcaaacaccttgtaaaagccaaccatagccagaccgttgctaaggatcacgccaacaaacagcacgcaaacaaaggtcggtaattcaaacattgtgccctgtagcaaggctgcaatgtgatgccctgccatcaaacaaatggcaatcatcgcaatggtttcgaccatcaccaacggcgtaatcagacggccagtagatggtttttcaaatgcagatggcagctcgctatcttccggttttccatccggcgtagaagaatgcttcaccagataacgggccacagggccgccgatcaatccacctaaaaccaggccgaatgtggcacaagccattgctacttcggtagcattttcaaaaccataacgctcgacgaacagtttactccacgccgcaccggttccgtgaccaccggaaagcgtgatagaacccgccaataggcccatcaaaggatctagccccatcagcttcgctaacgcgataccgatggcgttctgcattaatagcaggccgactaccacaaaaacgaatacgcttaacgctttcccgccggcacgcaggctggccagattcgcgttcaagcctatggtggcaaagaaagtcagcattagcggatctttgagggacatatcaaagctgatttcccagccaagagttttttgcaccagcaataacagcagagctaccagcaaaccaccggcaacaggttcgggaattgtatatttagttaggaagggaaccgattgtacgagtttacgccctagtaacagaaccagtgtggccgctacgagcgtgccataggtatcgagatgaaacatcctggtactccatgtaattaaaatatctaataaaaatatgacgttagccgaatccttaaaaaacgccaaagcaggttagggtggattagaaaaaaaaacgctgagaattacaagtttggtgagataaaaatgcgagcaggcaacaaatgcgtattttgaaaaaatcgaagcgcaaccgattgcttttgtgaagcggatcattaaaatgccccctttgccgattctggaatgccaacccatgaccacgcaatccgccgagctaaagacctcacggccggcctctcatactaatgcacccagcgaactgatttaccgattggaagatcgtccaccgttgccacaaaccctatttgccgcttgtcagcatttattagccatgtttgtggcggtgatcactcccgcgctgcttatctgccaggctttaggtttaccggcgcaggatacccagcgaattattagtatgtccctatttgcgtcaggactcgcctctattttacaaataaaaacctggggacccgtgggttctggtctgttatcgattcagggcaccagtttcaactttgtttctccgctgattatgggcgggctggcgttgaaaaatggcggtgccgatatcccgaccatgatggccgcgctgtttggtacgctaatggtcgcgtcttgcaccgagatcctgctatctcgcgttttgcatttggctcgtcgcattattacgccgttggtttccggcattgtcgtgatgattatcggcctatcgctgattcaggttggcctgacatccattggtggcggatatggcgcgatgagcgatcatacctttggctcaccgaaaaacttattactcgccggcgcggtgttggtcgttattatcctgctaaaccgtcagcgcaatccgtacctgcgcgttgcttcattagtcatagcaatggccgttggctatctgttggcttgggctatggatatgctgccagccagccaacctgctgccgaaacggctctaataaccattccaacgccgttttattacggtttatcctttgactggaacctattgattccgctgatgctgatctttatggtgacttcactggaaacaatcggtgatatcactgccacttctgacgtttccgaacaaccggtcagcggcccgctatatatgaagcgtttgaaaggcggcgtattggcgaacggtttgaattcaatggtttcagccatcttcaataccttcccaaattcatgcttcggtcagaataacggcgttattcagctcaccggcgtagccagccgttacgtggggtttgtcgttgctctgatgctgattctgttgggcctgttccctgcggtagccggttttgtacagcatatccctgagccagtattaggcggcgcgaccatcgtcatgttcggcactattgccgcatccggcgtacgcattgtctctcgcgaaaccctaaatcgtcgggcgattatgattatggctctttcattggcggtaggtatgggcgtggctcagcaaccgctgattctacagtttgctcctgattggattaaaaccttgctgtcttcgggcattgccgccggtggcatcaccgctatcgtgctgaatctgatcttcccgcaggaaaagtagcttccctggaagtgacccccataaataaatccaaatggtcgatgctattgcagcattgaccattttttattcctgattaaaggattgtctattgaggtcagggtcgaattgcggcataaacggagataacttcacgccaacagactgagatttaccagatgaaaactatcggaaaagtactcctgacgctgttactgctcctgatgttgctggtagccatcgcttatttactgttgcaaaccagttggggagctaaaaacctcagccgctgggtgagcgatagcagccaatatcagctatctctgggtaaaatcgatcacgattggtctcagccggggcagattaccttcagcgatgtcatgatttcgcaaaccaacaagcccgtctttcttaacgctgggcaggttgtttttgggctcagctggcgtcaaattaccgagccacgacacttccgcagcctactgttacaacagggcagcctaaatctggacgcgccttccccagcgttaaatattcaggccgatacgctacggctggcaaatatggcgctaaataccgcttcgcccggttcaagcattcaaggtaagaatatcactggcggtattattccgtggcaacccaaagctggcgatcgcttgggtgagaacaaccaatttcagcttagcgccgatgagctaaccatcggtgggaatgctttcgaaaatgtctttgtacaaggtacaaaaaacaaacaggcgcttaaactcactaacttcggtgccaatatcgcccaaggggaactgaccggtgaagcgagtcgcgagcaggatggccgctggcaggtagagcatttgcgtctcagtaatgtgcgcctgcaaaccgcgaagacgctggacgatctgtggcatagctatacgcaactgccgccggtcacggttaaacgtttcgatttgatcgatgcgcgagtcgaaggcaataactgggcgtttaacgatttggatctcacgctaaagaatgtggcgtttgaaaaaggtgattggcgtagcgccgacggcgagctagcgcttaatgcgggggatattatcaagggtgatatccatctgatcgaccctatgctgacgctggaactttccgataacggtgcggcgattaaacaattttctacccgctggcaaaacgggctgatccgagctaccggtaactggaaccgagccaatcatcagttacagcttaatgagctggcgattgtttctctagaatatacgttgccggaaaactggcggcagctctggcaaaagccactaccgagctggctagcagcagtacagatcaataagctatccgccagccgtaacctgctgattgatatcaatcctgatttcccattccagctcaccgcgctggacggttttggcagcgatctggtactggcaaaaaatagccagtggggagtttggtctggttcactaacgcttaatgcaggtaatgctaccttcaaccgcaatgatttgcgccgcccatcattggctctcaccgctaatgatcagcgaataaccttcagcgatctcagcgcattcacaccggaaggcttactggaagcccaagctgaaatcgggcaatccgcagagcgcccattctctctaacgctgacggggcgttcggtggatgtaaatttcttgcacaattgggggtggccaaaactgccgttcgaaggcaaaggaaatctgaatgtgcagctaaaaggcagtctggctcagagcattccctttaaaagctcgctgaacggctctttaaaggcgatagagaacggcgggcaacaagttgaccaactgatgcaggctggcgaagtgaacggcgtgacaacgccctgaggcaatataattcgggttctaactgctattctaacaactaaccgacgtcgcacgaggttgtagccgtgatctgctgcaacctcgcgcaagaggggataagcggcggttaacctgcttcggcgtcccctggcgttaccggcaacaccatataagtgcctgaaaatacggctccagcattttcatcaccaaataaattcacttccaattgcacccgcgccctacgtccacgcgccaaacgatccagatcgccactgatcgagcctaaatcggcaatggctcttggccgtccggtcactggcgcgctgtagcgaatatgggcatcggccagaataatggtaccgccgagctggcgttcacgcagtaacagccagatcaaaccccatccagtcagcgttgccagtgaaaataaactaccggcgaacagcgtatggtggggattttgattgccagcctcgggcatggtcgtcacaaaacgctgcccggtgtattggctgatacgcacgcccattttctcactgagcggaatatggtcgtaccaagcctgctgtagctgaccacaccagtctgggcgatgcaggatatcatccatggtcgccaccggcttaatcatcaaaaagtgacgtaccggcgtggtttgcggcgcggtaatttctccctgactgacaaaccccagcttgccgaagaactccaccgcatcttcacgggcgctacacactacccgcttaaccccttcctgacgcgctacggattccagcgtcatcgccaccagcgtgcctaatcctttgccctgtacagccggatccactgctaaaaaccgaatagcagcctcattatcagcattgatatataaacgaccaacggcaacgggtttcccctgctcgtccaccaccatttggtgatgcgccattgcatcataggcatccttttcggagccaacaggttgatgcagtggtttgcgtaacatttcccaacggaattgataataatctttaagttcttgttctgttatgggtacgcgtaggtgatacatagaagctatctctcttagaaatccatcaacaaaatgtattccgctaccctcagtaataacagagccagaatatccccaccctaaacctgtagccagaaagtcaccgggccgtcattgaccagactgactttcatgtccgcagcaaattgtcctgtttcagtttttacaccacgctcgcgacactgagcaacaaaatactgataaagcctgtcggcttcttctggaaccgcaccgcgcgaaaaactcggcctcatgcctttttgggtatccgccaccagcgtgaattgggaaaccaccagcaggctaccgccagcttgctgaacgttgagattcatcttgtcgttttcgtcactaaagatacggtagcccaacactcgttcacacaaacgctgcgctttttgttcggtatctccttgctcaacgcccagtaacaccaataatcccgagccaatcgtgccaacggtaacgccatccacatccacgctggcgctttgcgctcgttgaatcaaagcaatcataacaacctacatctcctgattttgcgtttcgtcacccggttcctgctttcgtaatgatcgatgctcacctaatgttacggtgatttctgctcccaacaatacgatgcaccagctccagtaaacccataaaaataaaatgggtatgaccgccaagacaccataaattaactgataggaaggaaatagcgtgatatacagcgtaaatcccttctttcctaattcgaacaaaactgccgccaccagcgcgccaaccagcgcatctttgaccggcaccggtaccgttggcaccacgctgtacagtaaccagaatgaaatccaggacagtattaacggaaagattcgtaatacctgatcgataaaactattcactccggtggttgccagccagttcaatgaaagtaaatacgaactgatcgccatactggcaccgaccaaaatcggccccagcgtcaacaccatccaatacactgcgaaggaaaagacgatagaacgcttattcttgctgcgccaaatggtattcagcacgctatccaccgagtaaatcagcaacagcgcggtgacaatcaggccacaggtacccacggccgtcatgcggttagagttggcgacaaaccgctcaatatagttttggataacattgccagcagatggcataaagttagcaaaaacgaaattcttcagttgaatactgatatccgaaaacatcggaaatgcggcaaacagcgcaaaaatcaccgtaatcaacgggactaaagacagtaatgagacataggctagatgtccagccagcatagttaagccatcgtgatctatgcgtctgaagagcattcgcccaaagctggcgctgggttttaacggcgacggtaaacgaaagcgcggaaatcctgccatattcacctcgaggtcaaaaatgggattgagagcgaagagtgagtcagaaaagggttaaccctaatgcgttaacccgtgatctcattaggaaaaataggctggaataacggttttgtcagttacatgaaccgcattaatacccaaggcctccgccgcttcgatatttgcagccacatcgtcaaagaacaccgcctgctccggagggtagttttcattatttaaaacatggtgataaatatcggcatccggtttacgcatccctaaatcctgcgacaaatacatatagtctgccgctgcagcgacctcaggataatgttgcggccaataattgcaatgcaaacggttggtattagagagcaccacaactctgtgaccttgctcgcgcagctttttcattatctcaataacttcagggcgcaaaccaacaaaaatcgcctgccaaccggtggcaaactgttcaaaactcagggaaagccccatttcgtcactaaagcggcgcgcaaaatcttcgtcgctgatttcacctcgctcatgctgctgaaaaatatcacccatggtgaaacgttcggtcaaagttgccaggggcacactgctcagtttgctccagacacccaaaacgcgtttgaagtcgatatcaacaatcacattccccagatcaaagatatacagcatagcgctctcccaaatttgaaggtgagttcactgtaacggtaaaaaagaaggctgaacagacggaggaagaaaaaggaaaggatagaattgaatatacggtggggtataaaaagaactcagggcgccaattgcgccctaagtgtctgttatagcttaaaaaggattaaccttctttgctaccacggccagcacgcttacgatcgttttccgtcagatgacgcttacggatacggatagattgcggggttacttcaaccagttcgtcgtcatcgatgaactccagcgcttgctccagggttttcttgaggaaaggaaccagagtggttgcttcatcagtaccggaggcacgcatgttggtcaattgcttaccagtcaggcagtttacagtcaggtcgttagagcgtgagtgaataccgatgatctggccttcatacacttcggtgccgtgaccgatgaacagcttgccgcgatcctgcaatttgtacagtgcgaacgcaacagctttaccctgaccgttagagatcagtacgccgttctgacgttgaccgatttcgcctggacgcacatcatcgtagtgactgaatgtggagtacagcagaccagtaccagaagtcatggtcatgaattcagtacggaaaccgatcaggccgcggctagggatggagtaatccaaacggatacgccccttgccatctggaaccatgtctttcacgtcgcctttacgctcacccatggcttgcattactgcgccctggtgttgctcttcgatatccagcgttacgttttcgaatggttcttggttacgaccgtcaatcatacggttgataactttaggacgagatacagccagctcgaaaccttcacgacgcatgttctcgatcagaaccgacaggtgaagttcaccacggcctgaaacgcggaatgcatcagcatcttcagtttcttcaacacgcagcgccacgttgtggatcaattctttgttcagacggtcaagaatctgacgtgatgtcacatacttaccttctttaccacagaatggagaggtgttaacgcagaagtacatggttacggttggttcatcaacagacagtgctggcaatgcttcaacagcattcacatcacaaatagtgtcagagatgttcaactcgcccaggccggtaatcgcgatgatgtcaccggcttctgccagattggtctcgatacgctccaggcccatgtggcccaatactttaccgactttaccgttgcgagttttaccttcgctatcgataatggtcacttgctggttaggcttaacaacgccacgtttgatacggccgataccgataacaccaacgtagttgttgtagtccagctgggagatttgcatctgcagtggaccgtcacggtcaacttttggcgcaggtacatgatcaacgatagcttggtacagcggggtcatgtcttccgccatatcgttgtggtcttcaccagcaatacccatcaatgcagatgcatagatgatagggaagtccagctgctcgtcagtcgcatccaggtttacgaacaggtcgaatacctgatccacaacccagtcaggacgcgcgcccggacggtcaactttgttgataaccacgattggtttcagaccatgagcaaaggctttcttggtcacgaaacgggtctgcggcatcgggccatccattgcgtcgacgaccagcagcacggagtcaaccattgacatcacacgctcaacctcaccaccgaaatcggcgtgtcctggggtatccacgatgttgatgcggtagtctttccaattaatggcagtattttttgcgaggatggttataccacgctctttctccaagtcattggagtccattacacgttcggttgcttcagtacgttcgccgaaagtaccggattgttgcagcaacttatcgaccagggtagttttcccatggtcaacgtgcgcaataatggcgatgttacgcagattctcgatcacagcttttttgcctcaggcatttagaaatagcgcgctattgtacacgtaataagcgagggactaaacaagatcacaaccatctcttataaacaacctgacatcggttagattgtgatcctattcacggtgcaaaaatcgcctttcggcgcactcttgcaccaatatggtgcccaatggcgcataggaagcaccaaaatagtgcaatataactatcctggtgcatactgaatatcagcagacccccatgatatggcataaatgggtggtttgaaaagttggcacagttttcgcaatactctttttaagctaaaaaagtctttttccagacaaaaatggcagctagccacaacctcagtacataacggtaatcgttccacgacgacgactatgacaaatccgggagatataagtatgtccgctgaacatgttttgacgatgatccatgagcacgaagtgaaatttattgatttacgtttcaccgataccaaagggaaagagcagcatgtcaccatcccggctcatcaagtcaacgctgacttctttgaagaaggcaaaatgtttgatggctcctcgattggcggctggaaaggcattaacgaatccgacatggtattgatgccggatgccagcaccgcagtaatggacccgttcttcgctgattctaccctgattatccgttgtgacattctggaaccaggtaccatgcagggttatgaccgcgatccgcgctctatctctaaacgtgctgaagacttcctaaaatcttccggtctggctgacaccgtactgttcgggccagagccagagttcttcctgtttgatgacgtgcgttttggcaacgacatctctggcgcttactatcatatcgatgatatcgaagcggcgtggaactctggtaccaaatacgaaggcggtaacaaagctcaccgtcccggcgtgaaaggcggctacttcccggtgccaccggtcgattccgctcaggatctgcgttctaccatgtgcctgaccatggaggaaatgggtctggtggttgaagctcatcaccacgaagtggcaaccgctggtcagaacgaagtggcaacccgcttcaataccatgaccaagaaagctgacgaaatccagatttacaaatacgtggtgcacaacgtggctcacgcatttggcaaaaccgcgacctttatgcctaaaccactggttggcgataacggttctggtatgcactgccatatgtcactggcgaaaaacgggactaacctgtttgctggcgacaaatacggcggcctgtctgaaatggcgctgttctacatcggcggtatcatcaaacacgctaaagcaatcaacgccttcgctaacccaaccaccaactcttacaagcgtttggttccgggctatgaagctccggttatgctggcctactctgcccgtaaccgttctgcgtcaatccgtattccagtgattgccagcccgaaaggtcgtcgtattgaagttcgcttcccagatcctgcggctaacccgtatctggcgtttgctgcccagttgatggctggtttggacggcattatcaacaaaattcatcctggcgatgctatggataaaaatctttacgacctgccgccagaagaagcgaaagagatcccaaccgttgccggttctctggacgaagcactggctgcactggatgcagaccgcgagttcctgacccgtggtggtgtattcactgatgattccatcgatgcttatattgcattgaaacaggaagaaatggatcgtgtgcgcatgactccacacccagttgagttcgaactgtattacagcgtctaattttaagtagcctttttttgttgccgtggaaacttttagcccatcttcggatgggcttttttctccactttatctttctttaatagtaacctgactcggcaattacgctgatttttcaggataaatgcactgaaccggtgttggagtctgctatatggcaacaggcacgctgcccgatgctgggcagatactcaattctctcattaacagcattctgctgttagatgatgacctggctattcactacgccaatcccgcagctcaacaactgctggcgcaaagctcccgtaaactttttggtacacctctgccagatttattaggctatttttcgctcaacattccgctaatgcgggaaagtctgatctcagggcaaggttttaccgataatgaagtgacgctggtagtcgatgggcgagcacatattttatcgctgacggcacaatcgctacccgaaggttttattctgctggaaatggcgccgatggataatcagcgccgcctcagtcaggagcaactccagcacgctcagcaggtggcagcgcgagatctggtacgaggattagcccacgagattaaaaacccgctcggtggcttacgcggcgcagcacagctattggcgaaggctctacctgacccatcgctactggaatacaccaaagtgattatcgaacaagccgatcgtctgcgtaatctggtggatcgcctgcttggccctcaacgtcccggtcagcatatcaaccaaagtattcatcaggttgctgaacgggtttgccagttggtatcactggaaaaaccgaataatgtcaccctgattcgtgattacgatcccagcctgccggaattggctcacgatccggatcaaattgaacaggtattactgaatatcacccgcaacgccttacaggccttgggtgaaaaaggcggcaatatcactctgcgtacccgcacggcgtttcagataacgcttcacggcgttcgctaccgtctggccgctcgaattgatatagaagataacggccccggtgtacccgcgcagcttcaggatactctgttctatcctatggtcagcggccgcgagggaggaactggcctcggcctgtccatagcacgcagccttatcgatcagcattcgggtaagattgaatttaacagttggccgggacacaccgaattttcggtttacctgcctattcgccagtgaggtttccatgcaacgagggatagtctggatcgtcgatgacgatagctccatccgctgggtgcttgaacgcgcactgactggagcaggtttaaactgtgtcagtttcgacaacggccatgccgtgttggatgcattggctacacaaactccggatgtgttgttatcagatattcgtatgccaggaatggacggtttagcgctgctcaagcagattaaacagcgccacccgatgctcccggtcatcataatgacagcgcattccgatttggatgcggcggtcagcgcctatcaacaaggtgctttcgattatctgccaaaacctttcgatattgatgaggctgtcgcgctggttgaacgcgctatcagccattatcaggagcagcaacaaccgccgcgcagccaacctgccagtgggccgacgactgatattatcggtgaggcaccggcaatgcaggacgtattccgcattattggccgcctttcccgctcatccattagcgttttgattaatggtgagtctggaaccggcaaggaattagtcgctcatgctctccatcgccatagcccacgggcaaaagcgccgtttatcgccttaaatatggcggcaattccgaaggatttgattgaatccgagctatttggtcacgaaaaaggcgcttttaccggcgcaaatcaggtgcgtcagggacgatttgaacaggccgacggcggcaccttatttctggatgaaatcggcgatatgccgatggacgtacaaactcgcctactgcgagtgctagctgacggccagttctatcgggttggcggatatgcgccagtgaaagtagatgtgcgtattattgcagctactcaccaaaatctggagttgcgggttcaggaagggaaattccgcgatgatttattccatcgcttaaacgtgattcgggttcatttaccgccgctgcgagaacgtcgggaggatattcctcgtctggcgcgctatttcttacaagttgcagccaaagaattgggcgtggaagccaaaaatcttcatccggatacagaaacggccctgactcgtttaccctggccgggtaacgtccgtcagttggaaaatacctgtcgttggctaacggtgatggcagctggacaggaagtactgattcaggatttgccgggagagctgtttgaaaccgtctcgccaaatgccgaagaccagaaacagcaggatagctgggccacactactggctcaatgggcagacagagctttgcgttctggtcatcaagatttgttatcggaagcacagccagaaatggagcgcactttgctcaccaccgctttgcgccatactcaaggacataagcaagaagccgcacggttactgggctggggacgtaacactctaaccagaaagctaaaagaattgggaatggaatagtcgagaaataacgccctcagtcgcagctatagctctgagggcgattaatcatcagataacgcgggagaattgctgtttacgtgcctgttttcgcaaataaatatcaaaacacatacagatattgcgaatcagtaaacgacctcgagatgtcacccgaatgcccgtttcgtctcgctccaccagcccatcgtcttcaaactgcgccagcaaagccaaatcttcggcaaagtaatcagcaaaacgaataccatactgttgctcaatcggtgcgtaattcagctggaaatgacaaattagcgttttaatcacgtcacgacgaatgcagtcatcctcggtcatcgccagcccgcgccacaacgcatttcctcgttcctcaacctttgcgtaataggttttcagatctttttcattttgcgcgtagctatcgcccaacatgctaatcgccgaaacgcccagccccagcagatcactttcaccttgcgtggtataaccctggaaatttcgatgtaatgtcccttcccgctgcgccaccgccagttcatcatccggacgagcaaagtgatccataccaataaattgatatcctgaatctgtcaggaaactgatcgtgtgctgcaaaatgtccagacgctgttccgggctaggcaaatcttcatctttgatttttcgctgagccgcgaacaatgaaggcaaatgagcgtaattgaacacgctcaagcgatctgggccaagctctgctacccgttttagcgtgaaagcaaaactttctggcgtctgcttcggtaaaccatagatcaaatcaatattggtcgatttgaatcccaccgctttagcgcgagcaatcagcgcaaagataaagtcttcgtcctgttcacggttgaccaatcgctgaacttctttattgaaatcctgcacccccatgctcaggcggttaaagccttcggcacgcaggtgatcgataacgtctagctcaatttcacgcgggtcgacttcaatggattgttccgcttcgggtaaaaaatcaaaattatcccgtagcaaattcattaactgcgtgatttgtgtgttattcagataggttggcgtcccgccgccccagtgcatctgactgacctgacgccctttgaataagcttgcgcgctgacgaatttctttttccagtaccgccagatattcatcagccttatgctgctggcgagtaaccagcttattacagccgcaaaagtagcaaagcttatgacaaaacgggatgtggacatacagcgaaagcggtcgctcagggtaacggccaaccgcccgttcataagccgcatcatcataagattcgctaaactcaagggcggtgggatatgaggtataacgtggacctgaatagttatatttttgaattagggccagatcccaaacaacagcgttctcagacattgttcattccttccgatatttttttctaccgggccggttaaaaggcgattgtttacgttgtctggccgcggaagcgctgcgcaggcgggatttccgctgcgacagccgccatagtttacccaataaccacactagataacatgtaagtagtagggttatcgtcgggatcacccaattcatagcttagaatgcgtctttattaccgcgtttcagtaactgtaagatatcttcctgcttctcttcaggcttttcatcatcttcgtcatcaccaagttcaatacccagctgttccatcaatgcgtcgatgcgatccaacgtcagatcgacataagcctgatcttctttgctcaatacttcgtcattatccagacgatccagtaatgcatccaggcgttcgtcattttccagcttagccagctcttcttccggtgtcagacgtggtttggctacaggcttaggcgcagcaggcttagctttaactttgccttcaaccaccagcggtacaggcactttactgccgatacgcggatctttttcctgaacctgagtctggcctttcttgttgttggcctctacgttggttctcgcacctgagcgattaccgctgtgtcttttctgacgtttacgttcgcgagcttcaagatcaagctctacgcgtgtctttttattacgctttggtgttgcggttttgccgcgcggtgctttcgttggctggttcataacctgtgctcttaaattaggtaaataaatataggattggatttagtataggattgcggcggaatctagcagaaagcagacaaagaaaaaaggcggcaggttgccctgtcgccttttttcgcaccttctgcggaaggatatccttacagcgcaatccgtgcgcttatccaacttccctgtttatcccttgactacacgacactccatgtcggtctgtccgtaaaatttaccgctccttgcagccttcctttgctccgcccgatcctggcatttactcgttcttccttgccgacttgaaagtcaccatcctgactcatccgtgggtcatcgtccttaatctctgctgattcctttcgattccctgagacaacaacccatcccgagtcgctgataatttccttttggtacatcccagtaccggcgataactttactagcccgttgtttttactcaagacacttacaccaatgcggactggttcaattatcaccgtattgataatagattgtttttaaagcaagatttcttaacaatacttaaaaaataagacatcgccgcagcaaaaaatgggcaatcgcttacaaaacatcaagttccagagccatttttctcgcatactgagttaatcgagataaaccccccgctttcccgccgatgtagttataatccccccatgttagctatctcttacggagacgaaaaattttgaccattaaaaactataactatcatatgacccatttcgtcatcagtgctccggatattcgccatcttccgcgcgacgaaggcattgaggtcgcatttgcgggccgttccaatgcgggtaagtccagcgcgcttaacacattgaccaaccaaaaaagtctggcacgtaccagtaaaacgccgggacgtactcagttgatcaacctgtttgaagtgaccgatggtatccgtctggtggatttaccgggttacggttacgcagaagtacctgaagaaatgaaaatcaaatggcagcgcgcgctgggtgaatatttacagaagcgtaactgcctgaaagggctggttgtgttgatggatattcgccatccattgaaagatctggatcagcaaatgattacctgggccgttgctgtaggtacgccagtgatgctgttactgaccaaagccgataaattggcttccggtgcgcgtaaagcccagttgaatatggttcgcgaagccattattcctttcatgggtgatattcaggtcgaagcgttctcttcactgaaaaaaattggcgttgataaactgcgggaaaaactggacacctggttcagcgaaattccgccggaagtgatggaagaactggaagacgacggcgagtaagcaagattccgcactgtgattaaccggtttatctcttaatcctccactctacgggcggcagcctctggttgttgcccggtattgcttcccagacttaaccccgcgtccctgtttcttccccaaattgcattctaacgctgaataaatcggccaatggccggattgcgcccataaaaaacgccccagtcaataaatgactggggcggctaaaatattcagccaaatccgattacgtgaagtaaaaggtctgaaagatagaacatcttacctctgtaccctacatctgtaactctacatcattttttcgcagggcaaaagaattttttgttgtatagttacacaaattggcacgattcagcggtgaggaaccgagcataatcggcacctaatgtagcttaattacataaaacgctttaataatcgccacttagtgagcctgatcccaattcttacccacgccgacatcaaccttcaacggcacgtccaattccatgctctgttccatcagatcgcgaatcttctgagtggcactttccagcacgctttcatgcacttcaaacaccaactcatcgtgtacctgcatgatcacacgaactagaggctcttcctgctgttgtaaccagttatctactgcaatcattgctcgcttaataatatcggcagcggtgccttgcataggcgcattaatcgcttcacgctccgcagctttacgacgagtggcattacgggagttaatatcgggcaggtacaagcggcgcccatccagagtggtcacataaccttgctcggccgcttgtttacgcgttctttccatatattccagcacccccggataacgctcaaaatacagatccatgtaacgttgagcttccccacgcggaatattcagctgacgcgccaaaccaaaggcgctcataccgtaaatcaaaccaaagttaatcgccttcgcgctacggcgctgctctgaggttacattttccagcgccacgccaaagacttctgccgccgttgcccggtgaatatctttacccgcagcaaaagccgccagcaggcctttatcctgtgaaagatgcgccataattctcagttcgatttgagaataatcggcagccagaatgctgtaatcggttggtgcgataaatgcctgacgaattcgtcgaccttcctcatttcttacaggaatgttttgcaggttaggatcgcgagaagataaacggccggtagccgttaccgcctgatgatatgaagtatgtactcgcccggaaaccgggttaatcattaaaggtaacttatcggtataggtacttttcagcttggccaggccacgatattcgagaataaccttcggcagcgggtaatccagcgccagttctgccaacacttcctcattggtggacggcgcgccgcccggcgtttttttcaaaatgggcagtttctgcttttcatacaaaatggcctgtagctgcttcggcgacgccagattaaaaggttcgcctgccaattcgtgcgcctgtttctccaattcagccaaacgaatggttaattcttgagaatgcgtagaaagaatagattggtcgattaacacgccggtgcgttctatatgcgacaaaaccggcagcagcggcatttcaatttctcggaaaatacgcagtaaaccttcgctttcctgtagcttcggccacatggctaaatgcaattgcagagtcacatccgcatcttctgccgcataaggcgaagcctgttccagtgcaatctggttgaaagtcagctggttcttaccttttccggcaatttcttcaaaagtaatggttttatgattgagataacgctcagacaggctatccatatcatggcggccagcaacgctattcaacacataagattccagcatggtgtcaaattcgatgccacgcagatcgatatcataacgagccagcaggcttttatcgaacttcaggttctgcccgactttatgcgatttcgcgtcttccagcagcggtttaaggtgtgccaatacccaatcacgatccagctgcgctggcgcgtccagataatcatgagctacgggcagataagccgcttcaccgggagcaatagcgaaagaaagcccgatgagattggcagtcaaagtgtctaaaccgtcagtttctgtatcaaaagcaaagacatcagcctttttcagccgctcaaaccaatcgaagaaagtttcttcatccaaaatggtctggtagttttcttgtgaaagctgtgccgtcacctcagcaatcggagcagcaatatctacagcggcggcagctttactatcactcttacccgtccccgtcgggcgcggtttattgccctccagccactttccgccttctaaatcaaccagccagcgtttgaattcataacgcccaaataatgtatgcagctgatcgacatcgggagccgaaaccgtcaactcgctacaagtcacatccagctcaacatcagttttaatcgtagccagtttataagagaggtaggcaacgtctttgttctgttccagcttggcagccatggttttcgcgccgcggaaagtcagggtcgcgattttatccagattgctataaagcgtatccaacccacctaagccttgtaataacgcctgcgcggtcttttctcccacgcccggcacgccaggaatgttatccgacgcgtcccccatcagcgccagaaaatcgatgatcagttctggaggtatgccatatttttcgcatacttcttctggaccaaggatggtgttgttcatggtattgatcagggtgatatttggcgtgactaactgcgccatatctttatcaccggtgctgattaatactgagtggccggctttctcggcttcctgcgccaaagtgccaatcacgtcatcagcctcaacgccagaaaccgctaacagcggcagccccatcgctttcaccatttggtgtaacggctcaatctgcgagcgcaaatcatcaggcatcggcgggcggtgagatttatattcagcaaatagctcatcacggaaggttttacctttggcatcaaaaactaccgcaacatggcttggatggtactgtagcagcaggctgcgcagcatgttaagcacgccatacatcgcacctgttggttccccgctggcgttggtcagtggaggaaatgcatggtaggcgcgatagaggtaagaggagccgtcaaccaggattaaggggttttctgcgatttgtgccataaggtgtcttcatctttaattgctgagtctggtgctaagaatgccatagctgacagcaagagacgaatcttagcggcctttcttgtgtgattttcgtgagcgatcgctgcatgatcgaaccgatccgttctgtggataactttgtgagtaaaagagtaaagaggatctattttaataacattacccatcgagagtattattaaaatacatataaatcattgagttaaaataatctacattcacaattatcgtcatgaaatttttatcgtaattgtggatattagttaattgaactttttatatagggaattaatattggtgtattttcctggcggagaatattggatatcaaaattttaaaaacggtggatagcttttcaggccctatggatgtgacgctggtataaattaaaacaccttactgtaaaatgcttaagcgatatttctataatcgatagattggtttttaggaattttcttaaactaattgaatcaattgaatattcaatgaaggaaaatcgtcattttattccagcctagttaattaaacgttgtcactttatattgataatacaaatttattccatgtttatcatagtgtttttttaaggtaataaaccggccgaagccggtttattatcactgaattatcattacttttgtttaatcaaaaagttaacgacatcagaatattgtttagcgtaggcttcttgtgaagaggtatcaataccgtcgtttttgatttggtatttaccattcacgaacatagcaggaacgccgcgtaatccgaggtcttcagccgctttttgttgttgcgcgaccaatgatttaacgacgaagctattgatagcactatcatactcttctgcaggaacaccggctttgataaacacattacgaatatcagatggagtctgaacaacctgagttttctgcacaccttcaaacatcaatggagtaattttatcttctacacccaatgccaaggcaacagcccatgcctgagttaactctttacctagaggccccaaaaagtctacatgataacgagtcattttagtgccttctggcagtgacttcttcactgtttcaggcactttatatatctcttcaaactgatagcaatgtgggcaatagaatgagaagaactccaaaacctgcggctcgcctgttgccggtttatctaaagtcacatattgggaaccatcagaaaattgtgctgctgaggcactaaatgccatcaccatacccactaatgcaagccatactttattcatacaataaaaatctccattatcttaacatcaatacattggaatcagctgtagagggggtgcctgcaacaacttaacctgctctgcaaataccgaagtctgctgtaaccaaaaatcaggctccgccatccacggaaaacttttaggaaaagctggatcttgccaacgtctgacgacccaagccaggtaataaaccatacgcatagcgcgtaaaggttcgatcaacgttaattcccgctgatcaaaatctgcaaattcgccataagcctccagcaatatatccaactgaataagctgctcgctacgttctccatgtaataacatccagagatcctgcactgccgggccattacgcgagtcatccaaatcaacaaaaaatgggccgtcacgccaaagaatattacctgggtgacagtctccatgcagacgaataggctgccagtcagtacgccagtactgtttgatagtatcaataagcaaatctgttgcagctaaaaacttatctttctgcttggttggaaccaactcacagtctgccagcaggcttcgcggttcagtcagatattcttcaacgctcatcgttggtcgggttataaaccggcttttgctaccaacccgatgtattcgcccgagaaagcgcccgacccactctaattgatccagattatcgatctcatactgacgcccgcccacgctggggaatacaacaaagaaaaaaccgcagtgggtatgcaaagtctggccattcagcgctaaaggcgctacggccggaatttctgcttccgctagatcgagagaaaaacggtgctcttcctcaatttgggcggcattccagcgctcaggtcgataaaatttcacgacataacgcttccggtcttcatccataaactgataaacccggttttcatagctgtttaacgccgttaaacctgaatccactcgcaatccgacgccttcaagggcatccatgatcaggtctggagacaatgactgaaaattaaaagcagagttatttagaacagcatttttaggcatcagttattcacggtgatctattgatagcagaagataacatcattcaaaaaacgtcggcattcattgccatgactaatctttaatgatgccacgagcccgtaacaacgccgttttgaaatcttcttcatagtcttttttcaaacctggaatggtttctgtagcggcagaacctcgcatcttcagatgataaatgagaatatcgtccgtcaaatctgaaaaatcgcctttaaaacccgcttctattgccagcttttgcaggaactgaatgagattcagatcgggttcttgttgccaggccggatgtaaaagttcaatcagttcatttacgcgatgacatttcatagaaaaactatcctatttgaaaatatgaagacaaagtagcagggttagccaggtagtgaaagagacctaactgtcaataaaggtaaatccttactccgtcactggtttagttatacaattcctgaatcgcttattgtaataaggtcggccaatgcagccaatgattaccggaataattctcgcaggagggcgctcaactcgaatggggggggaagataagggattgcttcaactgagcggaaaattgctgtaccagcatgtcgcagataaattggctcctcaggttaagcatttactgattaatactaaccgcaatatctcttgctatgagaaatccgggattccagtttttagcgatatcactgacgacttttccggccctttggcgggaatgctagcaggattaaatatagccgcgactgaatggtgcatttttgtgccttgcgatgtcccagatattccatcaaatatggttgagaaactttggcagggccgaaataacacgctggccgcttatgtgaacgatggtgaaagagatcatccaacgctggttttactgcataaaagcctgataacaacattagagaactatctggcaaatggagaaagaaaactaatggtcttactccaaaatattcatgctcaacgggttatatttaatgaatcagcagagatgttttgtaatttaaatacgcctgaagactgtgcgttatgggaagaaaggaatacagaaagacaatgagcaagccaattcccccactcctaggaatagcggcatacagcggcacagggaaaacgacattactgaagcaacttattcccctattacgacagcgtggcgttcgggtagggctaattaagcatactcatcataatatggatgtcgatacgccaggtaaagatagctatgagctacggaaagccggtgcagaccagacattagttgctagtgataaacgttgggcgctaatgactgaaacgccagataatccgtcattggatctccaatatttagcaagccgattggatgcaaacagtatcgatctcgtattggtcgaggggttcaaacatgagcctatcaataagatcgccctatatcgagcggctgtaggaaaaccttttaccggagtaatcgataagcatgttattgcgctagcaagcgatgaaccggcacctacagatttaccgcaattggatattaatcaaccctatcatattgctgatttcatctgttcctggctgaaaagtcagtcttaactgctgctgatagtataaagctggtcacgccattaggttggctcgaagatgatgacttagctgacttttcaacaggacgcttgcgcctgacagcccacactcttgccgctaaaaccacttttcaaacagccacttattcacaccgttaatagcatcttataacaccctgataactgggctaatttggggtagggttgcatcacattgcctaaaacttcggcaaaatcaccctcattgcaagttaacaacacaacaatctagatgataaaaaaggttatttggtatgtagcctgactcgtcagtcaccgccagagttttaaccagcagttaaaaatcttctgtctgttactcttcgcagtgaggccggtagtgtatcagaggcctcagcatcccgactggcgacacgttttatccccttacgccccaccggatgcaagcctggctcttgagctaccgccgagtgtgaatacccgttaatggggatgagtttccgataaaaccgacctggttcgttggttacatggctttttaataaaatataagcccggtgagtgactgtatctgcctgaaaatgctgcgaatttactgcctgaaaacgtcaacggcggcgcaatttaccggataagccgccccctatggaatgaaaatcgccatatacgccttcaacgcccggcattcccgggggttcccatgcccttaaacgcaaaaagccccccgcaatcgcaggaggctcggttcgagggcggcaatgacttttatccgcctcgcgtctgtcttttttccatagcaaaaaccccacgcttttggcatggggtcttggcttgatttgatgcctggcagtgtcctactctcgcatggggagaccccacactaccatcggcgctacggcgtttcacttctgagttcggcatgggatcaggtgggaccaccgcgctattgccgccaggcaaattctgttttaatcaacccgccacgtgatttacatcacacagccagtcaatccaatctgttaacaatgctgaaaatcaaaacgctctctaaaacaccttcggtgttgtaaggttaagcctcacggatcattagtactggttagctcatgcatcgctgcacttacacacccagnnnnnnnnnnnnnnnnnnnnnnnnnnnnnntcttcacacacgcgncatgnctgcatcagncttgcgcccattgtgmaatattcccactgctgccttccgtagaagtctggaccgtgtytcagttccagtgtggctggtcatcctctcagaccagmtagggatcgtcgcctaggtgagccattaccccacctactagctaatcccatctgggcacatccgatggcgtgaggccmtaaggtcccccactttgctcttgcgaggttatgcggtattagctaccgtttccagtagttatccccctccatcaggcagtttcccagacattactcacccgtccgccgctcgccggcaaagtagcaagctactttccgctgccgctcgacttgcatgtgttaggcctgccgccagcgttcaatctgagccatgatcaaactcttcaatttaagatttgtttgatttgctaccgaagtagcgatgctcaaagattactttctgcaaatatgcattcgaaccgaagttcaaatgtttactgctttggtcactcttcaagacttgatatttcttctgcctgccgaaacaggctttgatatcgtcttgcgagtgcccacacagattgtctgataaattgttaaagagcgttcgttacccgttcgcttgcggcgaatcttacggtaacgcgggaggcagataatacgctttcccgctgaagtgtcaagcttttcttttcaactttcgttttaagaaccggcgtttccgcctgcttaacacttcctgacccggcgaagtttgtttcgttgttcccggtcagtggaggcgcattatagggagttcctgacaggctgcaacccctaatttcaaataattttccaaccggctttttttcatcaaaaagtgcggaaatggataacttttctactacttttcagttaaacagccaataccagagtgaaacagtagagtaaaatagaaggataagaagttagccaggacaaatcaccatgcaatttaacgcccaacaacaagccgcccaacgcaacctttcctatttattagctgaaaagattggccagcgtatcctggcgggcgaatatatagccggttctatactgcccggagagatagaactaggcgaacagttcggcgtaagccgcactgcagtacgtgaagcggttaaaatgttagcggcgaaagggatgttgttgccacggccacggattggtacgcgcattatgccgcagtccaactggaattttctcgatcaggagttactcacctggtggatgacccgtgaaaacttcgatcaggtgatgcagcactttattttggtacgaaccgcgttagagccacaggcctgcgctttggccgcggttaacgctaatcctgcgcaaaaacagcaattggctatattgatggcagaaatgcaggcgctgcaccgtgaatttgatcgtgaacgctggattcaggtggatacccaatttcatcaactgatctacgaagccagtggtaatcccttcctgacttcgttcgccaatttgttcagttcggtatatcacagctacttccgtgctattaccggcgatgaagtgataaagctgcaacaccaccaatctatcgttgataccatccttgccagcgacagtcagggtgcctgcattgcctgtcaggtattattacaagacaaaaactgacggagtgtgtaatcacatgttatctatatatagaagagaggattgttaataacgaattccatcaggaaatagaatgattaaatctgctcgtagcatggccggcttaccctggattgccgccatggctttctttatgcaggcgctggacgcaacaatattaaacacagcccttcccgcgatagccgaannnnnnnnnnnnnnnnnnnnnnnnnnnnnnnnnnnnnnnnnnnnnnnnnnnnnnnnnnnnnnnnnnnnnnnnnnnnnnnnnnnnnnnnnnnnnnnnnnnnnnnnnnnnnnnnnnnnnnnnnnnnnnnnnnnnnnnnnnnnnnnnnnnnnnnnnnnnnnnnnnnnnnnnnnnnnnnnnnnnnnnnnnnnnnnnnnnnnnnnnnacgaagggtaatcaggcgcgatcgaccgggaacgccataacctcgctcaatcgctccgctcccagcgccagcatcaccaaacgatcgacacccagcgcaacaccggagcaatcgggcataccgtgctgtaacgctgcgatcagattgacatcgattggattttgcggcaatcccagaacggcgcgtcgacgattatcctgctcgaaacgtttcaactgctcgttggcttcggtcagctcgcggaaaccgttggctaactccatacctttgaagtagacctcgaaacgctcggctacccgatggtcttcggtactgatttcagctagtgacgcttgagaagcagggaaatgatacacaaaggccggtttttcacggccaatttgcggttctacgccaacggtgaacagcagctgtaatagcgtgtcgcggtcatcttccgtatcggcgatattgctcaaatccagcttcgccgccgcttcccgcagctgggttttgtccgctgacagtggatcgacatccaaatgacgcaggaaagcctgctgataagacagcgtttctgcgctgttacaatccagaatctgctgtagcaggtcgtcgacctcattcattaagcgatacatatcataatgaggacgataccactcgagcatggtgaactcgggattatggtgacgaccggcctcttcattgcggaaactacgacccaattgataaatggagccgctgccagccgccagtaggcgcttcatgtgatattccggactggtcatcatgtacagcgtcatgccatcggcagcacccgggccaacaaaccgggtttcaaaaggagacaggtggatatctgtcactgtcgcttggctcatggctggcgtttcaacttccaatacgccgcgatcggcaaagaaccgtcgtatttctgccattattgctgcgcgtttcaacaaattggcgatgggtgcacttggctgccagcttgccgtttcgctcatggtggttaactccgaaatcaaacaggggatgcagtctactcgcatcctatcaggcaaacaaatttgcgacaaagattgcctatttatgccacgaattcagcataacgcgtcgtcaaaaatccttatcaacagcagatcctgtctgcgatcacgtttctgccagttagcccgcgcgcagaggttcaaataaaacaaaacaatcgatcacatcaaatttctactacttatgattaggtatactcattcccatacaaatagtaagaaattgctattcttaatgagttcccccttgcatcgggtaattgattagcaaggcaataatattaaaaaccatattaagaatagacattccttttatatagccgaggtcattgaagttacaggtaggcaactggcaaaccgatcccgatcaactgattcaggtttttgattcggttgagaaagtacagttaacccaccgcagcctcaggtaccaagggtataagaatttcacttgaacaatggagaagcgcagtgcaaacctttaacgccgaccttgccattatcggggccgggggcgctggtttacgtgcagcaatagccgcagcggaagccaacccccaactgaagattgctcttatctcgaaagtttacccaatgcgtagccacaccgtggccgccgaagggggatcagccgcagtcactcaggaccacgattctttcgactaccatttcaacgatacggttgccggcggcgactggctctgtgaacaggatgtcgttgaccactttgttcacagttgcccggaagaaatggcgcagctggaaatctggggatgcccgtggagccgtaaacccgacggttctgtaaacgtgcgccgctttggcggtatgaagattgaacgcacctggtttgccgccgataaaaccggcttccatatgctgcatactctgttccaaacttccctgaaatatccacaaatccaacgctttgatgaacattttgttctcgatattttggtggatgatggacaagcgcgcggcgttgttgcgctgaatatgatggaaggcaccaaaatccagattcgcgccaatgccgttatcatggcgactggcggtgccggacgtgtctatcgctataacaccaacggcggcatcgtcaccggtgatggcatgggcatggctttccaccacggtgttccgctgcgggatatggaatttgtacaatatcacccaaccggcttgcctggctcaggcatcctgatgaccgaaggctgtcgtggcgaaggcggtatcctggtgaataaagatggctaccgctatctacaggactacggcatggggccagaaactccgttgggtaaaccagaaaacaaatatatggagttggggccgcgagataaagtttctcaggctttctggcacgaatggcgcgctggccgcaccattgcgacaccgcgtggcgatgtggtttatctggatttacgtcacctgggtgagaaaaaactgctggaacgcctgccgttcatctgcgagttggccaaagcctatgtgggtgtcgatccggtaaaagatccaatcccagtacgtccaaccgcacattacaccatgggtggcatcgaaaccaatcagcagtgtgaaacccgtattaaagggctatttgccgtcggtgaatgttcttccgttggcctgcatggtgcaaaccgcctcggctctaactcactggccgaactggtggtctttggccgcgtagccggtgaacaagccgcacagcgcgccatggaaagtggcccggcgaacggcaacgcgctggatgcgcaaacccgcgacgtagaggctcgcctggccaacctgatgaaacaggaaggaacggaaaactgggctaaaatccgcgatgaaatgggtctttccatggaagaaggctgtggtatctaccgtacgccagaactcatgcaaaaaaccgtcgataagctggccgagctgaaagagcgctttaaacgcgtgaaaatcaccgataactccagcgtattcaataccgacctgctatacaccatcgaactgggctacggtctggatgtagctgaatgtatggcgcactctgcacttaaccgtaaagagtctcgcggtgcccaccagcgtctggatgaaggctgtaccgaacgcgatgacgtcaacttcctcaaacatactctggccttccacacaccgggcggcacgccgcgcctcgagtatagcgatgtgaaaattaccaaactggcaccggctaaacgtgtctacggcgccgaagccaccgcgcaagataagaagacggcacaagataaaaaggataaggagcaggcgaatggctgatatgaaagtcctgaaaatggagatcatgcgctacaaccctgaacaggatagcgagcctcacttcgacactttcgaagtgccttacgatgagcaaacttcattgctcgatgccttgggttatatcaaggacaatctggcgccagatctgtcttaccgctggtcttgccgtatggcgatctgcggttcgtgcggcatgatggtcaaccgggtacctaaattggcctgtaaaaccttcctgcgggaatataccgagggcatgaaagtcgaagccttaggcaacttcccgatcgaacgcgatctggtcgtggatatgactcactttatcgagagtttggaagccatcaagccttacattatcggcaataaacaagatccaaaagatggcccaacccgccagactccggcacagatggcgaaataccatcagttctccggctgtatcaactgtggtctgtgctacgccgcttgcccgcaattcggtctgaacccagagttcatcggtccggcagcgattacgctggcacaccgttacaatctggatacccgcgatcacggcaagaaacagcgtatgcctcagctcaacggtaacaacggcgtgtggagctgtaccttcgtcggctattgctctgaagtttgtcctaagcacgttgacccagccgccgcgattcagcagggcaaagttgaaagtgcgaaagacttcatgatcgccatgctgaagccacaataagggaggggaaacagcaatgacaactaaacgtaaaccttatgtccgcaccatggccccgaactggtggcagaagctgggtttttaccgcttctatatgctgcgtgaaggcacctccgttccggcggtctggttcagtattaccctgatttacggcgttttcgccctgaaaggtggcccggcaggctgggaaggatttgttagcttcctgcaaaacccgctggtgctattgattaatatcatcacgctattggccgcgctgcttcataccaaaacctggtttgagctggcacctaaggccgccaatatagtggtaaaagacgacaaaatgggaccagagctgatcattaaatcgctttgggtggtgactattgttgcgacagcggtcattttggccgtcgccttaatctaacccggagggaaataagatgaatcaagttcctaagcgctccgatgaaccgattttctggggtctttttggtgctggcggcatgtggggagccattattgcaccagcggttattctgctggttgctattttgctccccctcggcgcatatccaggcgacgctttaagttacgagcgggttttggctttcagccagagcttcatcggccgcgtattcttgctgctgatgattattctgccgctgtggtgtggcctgcatcgtattcaccacgctatgcatgacctgaaaattcatgtgccagccggcaaatgggttttctacggtctggcagccatcctcagcgtagtcgctgctatcggcgttctcactctgtaattctgaacaaaacggcctgccccgcgcgggccgtcttccctttgccccacttgtcatccccctcaaaatttgcatcactgatagatgagagttattttcaataagaacttattactaacaggatgcctcgctatgtctgtcccactgtggtcaaaaataacggtacttatgtctgccctgctctccgtggcttgcagcgtaacgccgccaaaagatgtcaaaattgtcgataactttcagttacctcgctatctgggcacctggtatgagattgcccgtctggatcactcctttgagcgaggtttagagcaggtgacggcgaattattcactacgcggcgatggcgggataaaagtaataaaccgcggctataacccacaaaaacagcgttggcaggaaagtgaaggcaaaggttatttcattggcgaacccaatcgggcggcgctaaaagtctcctttttcggcccattctatggcggttacaacatttttgagttagatgaaaactatggttatgctctggtatgcgggcctaaccgtgattatctgtggattctatcccgtacgccaaacctcagcgccgaagtacgtgaaaaactgctattaacggccaaaggctatggtttcccagtggaaaaactgatctgggtgaagcaggaataagctagaactgagatcgaaaaagggccgaagatcggcccttttctattctgatatttatcaattcgctaacgtttagcttaactagctaatttcaaaccaacaataccagcgacaatcatgcctaagctaagcaaacgtgccgcgctggcggactcaccaagcagcacaatacctaaaatggccgtacctaccgcgccaattcccgtccaaaccgcataggcggttcccgcaggcaggcttttcattgcatgagccaatagcaccacgctcacaaccattgccgccagcgtaataatactgggcgccaaacgagtaaaaccctgagtatattttaagccaatagcccaaataatctctaataatccggcaataaccagaataacccaagccatagtaatcatcctaatgggaggggtcgtccccagatagcagcggttttgccgggtcgtcccgggctgcaaataaaaccgcatttaaattagcacgacgcctaacggccatcaataaggtgggaggaacaatctggtgcccaagaatggctaagggatgctagggaaagatataacaggaatgaccttccgccgttaagatttaataaaaatcattagaagaataaaaaacaaaaaattaatgatttaaaattattaattagctattgaagtacatacaatcaacactaggaataaccttaaattctcgattgagaatagtcctaacattgatatatttcatttccattatcttaatcacaatttattgattgattttaaagaaacacgcaaaagaaaattttattaaattcattatttaacactagttcatggctatttttttgcaaaattcgatcttatatttcaatatttactttagagacaaataattatcccaaattagctcaatcatcgatcgaatataatgtaaaaaacaaaatttgcagtatattaagccgagaattaagccgggcaattaaattcatgatttaacaaatcagggcttcgcctgcttattcccccacgccagtaatatgtggaatttaacaacatcatttttatctcaaggatttgataatgaaaaagttattattaactgctgttattgcagcatctttctctgcggctgttcatgcggcgccacctgctgccggttcccctgggaccatccgttttgaaggcgaaatcgtcaccggcgcctgcggtattgattctaattctttagatcaaaccgttaatttaggtcaggttccttcccatttatttacggcaaaaggcgaccgttcgacggcggctaagttcgatatcgtattgaccgactgcgataccactacgtctaaaaatgccaccgtaacctttaccggtgctggccaccaagaaaatagcgaactgttaggcgttactggtgcagcaactcatgtgggtatccgcctacaggccggcaataatgaatatctggcattaggcaccgccactaaacctattatgttgagcaatggggataaccgactgcaattttcggccatgtatgaagccactgatgcaggcgtaaccgcaggtgacgcagattctacagcgcaatttacggttaattatctctaataatattcaacggctttaatattaagggggaatatattccccctaaacatacagggcaagaattgtgaaaacttatagcttttataagtgggtactctgcgtacctttttttgccttcgaggctgttggcgtagagtttaatactgaatttttaaaaattggtgaacagggtcaggctgacctttcacaattctccgcgcccgatcgattggccccgggaaattatctcgtcgatatagttgtaaataataactactacaagcaacaagaaattaactttgtcgaaaatgcgaaacatccgcaaacacaaccttgtttgcctcgtagtctgattagcacttttggtttaaaacgagaatatatctcgtcgctgcctgaacactcatgcctactgatttacccggtattaccgcacgttattataaaaataacggacagttgaaaattaccgtgccgcaatccctactggaatattatgacaaaaactatactccaccagagcaatgggatagcggtattgccggcctgatgctggattaccgcatcatcggaaatacccgccagaataaacatgaggatagagttaattccctttctgcatttggcacgaccggggctaatttaggtgcctggcgttttcgtggcgactatcagtttgctaattacagtaataaagaaggcaatcaatctttagattttaataacatccatgcctttcgtccgttgccctcaataaaatcgcagctcactttggggcaaacctatttaacctcggatattttcgacacgctcagttacagcggcatcaagctcgccagcgacgagcgtatgctgccgcccagcctgcgcggctacgcgccgcggatcaccggtatcgctaaaacgaatgccaaggtaaccgtcagccagcagggtagaaccatttatttaaccaccgtgccgcccggcccgttcaatattcaggatttgagcagcgcagtacaaggcgagctgcaggtcagcgttgaagaagaagacggttccaccagccaatttaccgtaaataccgcctcagttccctttctaacgcgagagggacaaattcgctataacaccgcgatgggtaaaccgaccaacggcggtaatcacgtacaaaacccattctttaccatgggtgaaatctcctatggcgtcagcagcacctggtctgcctacggcggcactattctggctaacgattaccactctgccgccgttggtctgggtaaagatttatatcaattcggcgcagtttcgctcgatgtgacccaagctcgcgcgactttggaacatcaacaatatcttggtcattcctatcgttttaactatgccaagcgtttcgacagcctcgatgccgatatccgcttctttggctatcgtttttccgataagaaattcatttccctcagcgaatttaccaatgccagcaacggggtattacagcgagataataagcaacgctactcggtagttacggctaaacagttcgatggcttttctacctatctttcttatacccatgatgcgtactggaacgctaaatccagcgaacgtttcgatctttctgccagcacgctattcgacattgagcagtttaaaaatgtctctctcaatatttccctgtcttataacaaagatcaggatcgtaacgatctggtgagttatttggggatcagcatacctctcgaagggcagacccgcgtgagctataaccagcaaactggccgcggtcgctttgaccaaaccgtgtctctgcgacaaaaccgaggtaaggacgattattaccagctaactaccggcggccagcaaaataacgctctggtcagcggcttctatcagcataaatcagatgcctaccagctgggattaagcggcagctatgtgtctgacagctatcattctgctagcgctaatctcagcggttctatggtcagtactttgtacggctccgcgctacattcttccggcagttccggcaacacacgcttattggttgatacccacggtgtttcagatgtgacctttaataacggtaaaaaccacactaattcattcggctattccattatcgatggcgctcctccctatgagaatttcgaggcgcgagtcgatatgaataacctccccgcgaatgccgaagcccatgcgccgatccgcagtctggtgctgactgaaggtgccatcggctacctgccgtttgaaatgaatcagggcagcaagctgttggtattactgaaggattaccaaggtgtttccgtgccgttcggggccgaagtcaccaatacccaaaccggtaaagctaacgccattgtcggcgaagacggcctgacctacctgatcggcgtgaaaccagagagtcagcttaaagttcgctggtcggataaaagctgcaccctcgtcctgccacaggtattgcctgatgccgttacgacgcctcaacccatgagttgccgctaacccttttgttaaaaatgacgcttaggaattgaatatgaagagaacattacatcgctatttcatcaccattctgacgctgctgttatgcggtggactcagctccgctcaggcggctctggtattggatcgcacacggatcatttatcaggaaggcgcgcagtctattagcatcacgttgaccaataaaagcaccttgccttatgtggcgcagtcttggatcgaagatagcgaagggaaaaagatcgcttcgccttttctagcattacctccgctacaacgagtggaacccggcgatcgcaacgtcgttcgtgtcactctcctaccggataacgcgatccctaaagatcgagaatcagttttttatttaaatattcgcgaaataccgccgaaaactgataaaccgaacgcattgcaaattgccctgcattctaaaatcaaattattttaccggcctaccgccgttattcctccgcgtggggaaaataatgccgccaaactggccatcaccacccaaggtaagcagctaaccattaaaaatacgacgccgctgcatgtcaccttggtggccatcgccataggagccggaaagtccccgctggtatttgaaccaaaaatgttatcgccgggagaaagcatcgtagtacccacaaaccatcctgttaacggccggatttatatatctcatatgaatgattatggtggccagcaggataccgcctacgattgttcagcttctgaatgctccagtaacgataagcagaggtcataatgcgacgtttagcctctcttttatgcctgggcatggctttggcctttctgtcacccgcagtttgggccttggcctgcgttcgcaccgatggcagcggtttaatcctgaccgaaagtatcggctcaacggtcaaagtgcccaccactctccccgattacagcgtgatttggcgcggccccacccggagtatttccgctcgctgttatcgcgataacaatattcgcgaaatggagaacatttacttctacgtcaatccgagaaacaccaatccattgaactggggaattgaattcgggatgcgttttaacggcactgaccagtggccgcagggcggtggtaacggtgctggaatcaataccggtagcgtgataccggcctgtaaagcaggaattccgctggcacagtgtcctgatgtcacctttgccgtcacctttcagccgattatccgcaaacgtgggctggatccgttctcaccaacgccggatagcacctatgccctgtaccaactggacggcaaatacggcctaaataacgctcgcgccaactttacctatgttattaccgatttaagtctcataaccgcaaccgattgtaccgtggatgtaaccatcacaccttcccccggcgtcgtcgatttcggcacggtgcagaagactccctccggtttttcaccggcggtaccgcaacagtttttttcactggttctggataaaagcggctgtaaaacaccgattaaaatcaacggctatatcacgactcccaatgcttatggcgactatctgctacccagcgcagacagtggctttggtatcaaactaaccgatctggcaaccaatagtcagattccattggccaaaccgttctttttagcggatttcaccgcgttagatacacagcacgaagtgttactcagcgctgagctggttcctctcggcgagattaaagtcgggccattttctgcgactgcgacggtggaaattctctatctctaaacttcgggacagatgcggttgaacgtccttcatatggatttgtaggggattgaaatgaagaaagtcgttttgattgatccatgccgctttagccgagttggtgttgaatggttaataaactcgcgcatgcatttggcatctaaagttgcactggcgcaaaccagcaatctggtggtcgccaatgcacaaattaaactgtggcaacctcaattggttatcgccgatctttattcttacgtctttgaaacacataaccttaaaattttagagtcacttttggctacctgtatctccagcaagttactggtttatctgcactcccctttgccttggctcagccaatatcttctagatcgtggagcgtggaaagtcatcaccaaaaaacataacatcagtcaattggaacaattagtaagtgctgcattatgcaatccgatgggaaattactctgagcaaccattacaacccgctccggcattatttagtgatagagaggagtcgatattaaattactggctggaaggctgggttgataaaagaatagcaaacacattagatattcatattaaaacagtttatacccacaagcgtaatattcgcctcaaattaggtgcgagcaatcggctttctctttatctggatctatcaacaaatcaaggtcaataactcaaattggcggcagcaacctgatctgttgccgctgattttagtggatacgtgatatggatagatttattcggtgctagcggtgttatcaaatcaggccagatctatctgaatataaagaaaaaccattattattttccacatcactttagcttaacggatgagcagttcataaaaatcatgtcatcaataacccccccatcaaaaaaaaatcactggaattaatatttatagatatttaattattttatgaaatacatcactcatattaagtcgttgcgaaaaccataggtatcagtgattgttacatgaagaaaataaagagttaacgtcctgccagcaatagatgaagaatataccatagagaaaaattggagtattacacataaaaaaggaatgaattatgaaagataacaaaactatagcattcatattattttctattttcatgatattcagtcaattttcttcatttgcccaagcccatggatatattcaatatccagctagtcgagcctatctatgtcaattaggaaataatactcaatgtggctctgtacaatatgaaccgcaaagtgtggagggtataaaaaacttcccagaacatggtcccactgatggagctatcgcgagtgcaggagtcggtatgtttacaccgctggatattcaaacgcccacccgttggtctaagtcaagcatttactctggccccattacattcacttggaatattacggtagaacatagtacaactcgctggcgttattttatgaccaaaccaaattggaatagatcagcaccactctctcgtgcatcatttaatttaataccattttgtcaatataatgattatggaagtattcctgataaatccgttactcatcaatgtgtattacctaacaaccgcacgggttacaacatcatccttggcgtatgggatattgcagatacgaataatgcattctatcaagtaatagatgtcgatataattggttaatgttatcaacaaccagagaaacaaatacacagtggaaaatacagatcggttcccggattagttttgaagtgggaaagataaagaaccccaatattcgaatataactcaattattggggttctttatttattaactgccagagttatctggatcagttaataaatcataactatttcaggcactaattacttaacacgagaaacatattcgccagagcgggtgtcaactttaataacttcaccaacctgtacgaacaatggcactttaaccactgcgccggtgctcagggttgccggcttgccgccggtaccggcagtgtcacctttcagacctggatcggtatcagtgatttccagctctacaaagtttggtggagtcacaacgataggctgaccgttccacagggtaacgatacattcagcctgatcgatcagccatttggcgttttcgcctacggctttaacatctgctgccagctgttcgaaagtttcgttattcatgaaatgccagaactcaccgtcgttgtacaggtaagtcaggttcatatccatgacgtctgcgccttccagagagtcggtagatttaaaggttttttccaactgtttgccagtcagaaggcggcgcattttcacacgcgcaaaagcctggcctttacctggcttcacgaactcacttgattcaacggcgtaaggttcgccttcgaacatgattttaagaccgggacggaaatcgttgctagaataagtcgccataatggccctctgaatattgaaactggtgttaagcccaaaaaatggcaaacattgtaacccgaaacatgccaattagagaagattggttgcagcaactcgccgatgtaattaccgatcctgatgaattactccgacttttagcgctaaatgatcatgccgagctacagcaaggtagggacgcccgtcgcctgtttccgctgcgcgtgccccgcggctttgttgcacggatgcgcagcggcgatgcaaaagatcctttattgctacaagtccttaccgcacgcgaagagttcgtcaccgctcccggttttactaccgacccgctggatgagcaacgcagcgttgttccaggcttgctacacaaataccgcaatcgcgcactgctgctggtaaaaggcggctgcgccgttaactgtcgttactgtttccgccgtcatttcccttatcaggacaatcaaggcaacaaggccaactggcagcaagctttggactatattgctctccaccctgaactggatgagattattttctccggcggcgatccgctgatggccaaagatcacgaactggattggctgatcacccagttagaggccattccgcacctgaaacgcctgcgcattcacactcgtctgccggttgttattcctgcgcgcattacctctaccctatgtcagcggtttgcagattctcgcttacaggtgctgatggtgacgcatatcaatcatccgaatgaaatcgaccaaccgctgcgtgacagcatgacgcgcctcaaacaggccggcgtaactctactgaatcaaagtgtattactacgggatgtaaatgacgatgccgacgtgctggcagcgttaagtaatgcgctgtttgacgcaggaattctgccgtattacatccatgtgctggataaagtgcagggcgctgcgcattttatggtggatgatgatgaagcaagattgctaatgaaagggctacttagtcgggtttctggttatttagtgccaaggctggcgcgggaaattggcggggagccgagtaaaacacctttggatttacgcttgacgcaaagctagcctgcaaaataaatcaggagataccttggcatctcctgatgatttatttcttttcgcttaaactctggcaagcaaaggttatgggcacttataaacctgaccaaccatcttgctgtctaacggagcgaagctggacaagaaggtctcgctcgggctggttgcaccaaaaatcacgttgccgcccatcgctgccgctttgttacgcagatcgttggctgcaccgcgcatagaactgctttcaccgccctggccggataaccagttgctttggctgccgctgacttcgccaactaactggcattcgctaccaggcttagtatcagagaacttaacctgctcgccagccgcagttaactgggtggtagagctacagccagccagcaacattgccgctgaaagaccaagtaatactttaatccgcatttttttccccatcagatattgagaatcacgccaaagtttaccagaaagcaaagtcgccgcttaggcatccgttgccacatttatctgggcaataatagcttacagtttacacgctaactctgcgctgtggctaaaaaaatcccagtgggcatcacacgactgaattaaaccacattttaaattcattaaataaatgtataagcctaaaatccggtaacaagcttatatctacggagaaatacgaatttcatcaatttggcaacaggtgaaggaaaggtgcgggattgttgattatggcaaggttgaccgtgatagcgccggagcagagagggagaaaagaaaaaagcgagcaggtttccccgctcgctttaggtttatagcttattcgcaatcaatgaagctatagggtgtggggcattacatcatgccgcccataccgcccatgccacccatgccacccatgccaccagcgcccatgtcagcgcctttatcgtcgcgtggcaggtcggtgatcatgcactcggtggtgatcatcaggccagcgatagaagctgcgtattgcagagctgaacgggtaactttggttggatccaggatacccattgcgatcatatcgccgtactcttctgagtaagcgttataaccgtagctgccttcgcctgctttcacgttgttcgcgataacagaagcttcttcaccggcgttaaccacgatctgacgcagtggagattccattgcgcgcagcgcaactttgatacccacgttctgatcttcgttgtcgcctttcaggccagagatagcgtgagctgcacgaatcagtgcaacaccaccacccgcgactacgccttcttctaccgcagcacgagttgcgtgcagagcatcttcaacgcgagctttcttctctttcatttcaacttcggttgctgcgccaactttgataaccgcaacgccgccagccagtttagccacgcgttcttgcagtttttctttgtcgtattcagaagttgcttcttcgatctgagcacggatctgagcaacacggccctggatcgcagcttcgtcacctacaccgtcgatgatgatggtggtgtctttgttgatcacaacgcgttttgcctgacccagatcttccagagtggttttttccagttccagaccgatctcttcagaaataacggtacctgaagtcagagtcgcgatgtcttgcagcatagctttacgacggtcgccgaagccaggtgctttaaccgcagccactttcacgatgccacgcatggtgttaactaccaatgttgccagcgcttcgccttcaacatcttcagcgatgatcagcagtggtttaccggctttagcaacggcttccagaactggcagcatttcacggatgttagagattttcttgtcagccagcaggataaatgggctttcaagttcaatagaacctgtttctggtttattgatgaaataaggagacaaatagccacggtcgaactgcataccttctacaacgtccagctcgtcttgcaggcctgagccttcttcaacggtgataacgccttctttaccgactttttccatcgcttctgcaatcagtttacccacggtttcgtcggagtttgcagaaatagtacctacctgagcgatagctttagagtcagagcaaggtacagacagttttttcagttcttcaaccgcagcgataaccgctttgtcgataccgcgcttcagatccatcgggttcatgccagcagcaacagctttcaggccttcagtgatgatggattgagccagtacggttgcagtggtagtaccgtcacccgcagcgtcgttcgctttagaggcaacttcttttaccatctgagcacccatgttctcgaacttgtcttccagctcgatttcacgcgctacagaaacgccgtctttagtaatagttggtgaaccgaaagatttgtccagaacgacgttacgacctttagggcccagggtgactttaactgcgtcagcaaggatgtttacgccgcgaagcattttaatgcgtgcgtcgttaccgaattttacgtctttagctgccattggtattttcctttaaactcgttcagttcagaagatagtgagagcgcgattacgcttcaacaattgccagaatgtcactttcggacatgatcaacacttcatcgttgtcgatcttctctgacttcacgccgtagccatcgttgaaaataaccacgtcacctactttcacatccagtggcttgatttcgccgttatccaggatgcgaccattgccgacggccagaacttcaccacgggtagatttacccgccgcagagcccgtcagaacgatgccgccagcagatttagactcaacttctttgcgcttgacgataacgcgatcatgcaatggacgaattttcattgatagctctcctttgagaaggtccgtatcagatttaggattgataccggtctgccttcataaccagtaccgtgggtttctaagtggggacgtttacccatcccttcaagggataagacaaaaaatttttaatttttttgtcttaaaagggcaaactaagctaactcagccccactgcgaccacggtcatattcaccatgtgattttatttttaaaaaacatagcattataaaatttcgttgcgcttatttatcgtctttgaaacggtcatcgcgagaacgatcgctttcttcgtcacggtgttccacgtggaagcggccatcatccttacgctgaaattcgccgtcaaaggtattcccgtccgccgtcgggccggtgctccttgaacgataaatattcaaatgcggcatcagtttcaaagtcagggacttttgaattggcggcaacagcaataataaaccgaggaaatcggtaaagaagcccggtatcaacagcaagaagccagccagtaccagcgatacacttttcaccatttctgcagcagggctttcacccgcagccagcttttgctgcatttgcataaaagttttcaccccctgattgcgcaccagagacacgcccacgcaggaggtaaaaatcaccagcagtaaagtaaccaacacgcctaaagcggctgccaccttgataaatatcgatatttctatgtaagccaataaaaatatcagcatgaacggtaaccaacgcaccgtattctccttattcagctcatctagcttccgtcgagggccgaatcagggcacttcagacgaaaatcatgagaatgggggcaacgccgccgcggcgcattatgcctactacactaacgtggtggtgcccatgacatttttcaagcagtccactctcttttattaaggttttatctaactgtgagaacaatcacagatatcaaatcctgttgattaattaccaccatatagtgatctgagttcaaggcatttatctataagcagcatatgatcgtggcagcaataagttgaacggttaatccttccgcacttgttgcccacggcgacataaattattcaacaagcaaataattagacagcacaatagagaaggttctcatgtcaaataacattcgtatcgaagaagacctgttaggtacacgagaagtccccgcagaggcttactacggtgttcataccctgcgtgcgattgaaaacttctacatcagcaatagcaaaatcagtgacgtgcctgaatttgtccgcggtatggtgatggtaaaaaaagccgccgcgatggctaacaaagaattacataccatcccgcacaaaattgctgacgtcatcattcgggcgtgtgacgaagttctggataaaggcaaatgcatggaccaattcccggtcgatgtattccagggcggtgcaggtacttcattaaatatgaataccaacgaagttctggccaacattggtctggaactgatggggcatcaaaagggtgaatatcagtacctgaaccctaacgaccatctgaataagtgccagtctaccaacgatgcctaccctaccggttttcgcatcgcggtttacgcatctatcatgaaattgatcgatgccatcaatcagttgggtgaaggcttcggtaaaaaatccaaagaattcgaaaccattctgaaaatgggtcgtacccaattacaggatgctgtacccatgactctgggtcaggaattccgcgcattccaggtattactaaacgaagaaaccaaaaacctgcaacgcaccgccgaactcctgctggaagtgaatctgggcgcgaccgctatcggtaccgcactgaacactcctgaaggttattccgaactggccgtgaagaaattggctgaaatcagtaatctgccggtagttccagccgaagatttgattgaagcgacttctgactgcggcgcttacgtaatggtgcacagcgcgctgaaacgcctggctgttaagatgtcaaaaatctgtaacgacctgcgcttgttgtcttccggcccacgtaccggtttgaatgaaatcaacctgccagaattgcaggcgggttcttctatcatgccagccaaagtgaatccggttattcctgaagttgtgaatcaggtttgctttaaggtgattggaaacgacacttgcgttactatggcggccgaagcgggtcagctccagttgaacgttatggagccggtgattggtcaagcgatgttcgaatctatccacatcctgactaacgcttgctacaatttgctggagaaatgcattaatggcattacggcaaataaagaagtttgcgaaagctacgtatttaattccatcggtatcgtaacttatctgaaccctttcattggccaccataatggtgacatcgttgggaagatctgtgcggaaaccggtaaaaatgtgcgggaagtcgttcttgaacgcggcctgctaactgaagccgagctggatgatatcttctctgttgagaacctgatgcacccagcctacaaagcaaaacgctataccgatgaaaacgaacaataaaataaccatccggtagcccttaaaggcacgctagctcccctggacagcgtgcctttttactttctgacaaacacaactttataactttttattttcatttcattcaaggagtaaacactatgatagccgtagaattagtcattgttctgctggccatttttttaggggccaggctgggcggtatcgggatagggtttgcagggggcattggcgtattggttttagccattattggtgtaaaacccggcagtattccctttgacgttatttcaatcattatggctgtaattgccgctatctctgcaatgcaggtcgcaggcggcatggattatctggtacagcaaactgagaagttgctgcgtaaaaacccaaaacacatcactattctggcgcctctggtcacctattttttgaccatttttgccggtacagggaacatctctctttccgcattaccagtgattgctgaagtggcgaaggagcaaggcataaagccttgccgtccgctgtctacggccgtggtttcagcgcaaatcgccattacagcatctccgatttctgccgccgtggtctatatgtcctcggtaatggaaggccacggagtcagctatttacatctactgatgatcgttattccctccacgctgtgcgccgtattcttaatgtcgctgatcgtgtcatggtgctttaactccaaactgtccgatgaccctgtttatctgaaacgcctcgaagaaggtttggtcacgctgcgcggcgatcaggtcaaagtgatcaagcctcgggccaaaacctcggtattactgttcctgttgggcgttatgtgcgtggtggcttatgccattatcaacagcccaagcgtcggtctggtagaaacgccgctgatgaacaccaccaacgcgattctgattatcatgctgagcgtcgcgacgctgaccacgctggtctgctccgtggatacagatgccattctcaactccagcacgtttaaagccggtatgagcgcctgtatctgtattctgggcgtggcatggctgggcgatacctttgtacagcacaatctggtatggattaaagaaacggcgggtggcctgattcaggctcattcatggttgctggcagtgattttcttcttctgctctgcgctgctgtactctcaagctgcgactgccaaggcactgatgccaatggcgatggcgctgaacgtttctccactggcggcgattgcttctttcgcagcggtttccggcctgttcattttaccaacctacccaacgctggttgcggcggttcaaatggacgataccggcaccacccgcatcggtcgcttcgtctttaaccatccgttctttattcccggcaccatcggggtcgcgctagccgttgtattcggcttcgtgatgggcggtctggttctctagttctccccgagggcgccccgtgcgccctcatcaatcccctcttatcccgctgcattaatctccatattggataaatcatcttcagacccgcccctccttcggggtatagtgcatgactgtcagcttttcctagcgaggttagaatgtctgattctgatgtgattgtcgtactgtgcaccgcacccgatgaagccagtgctcaagatcttgcagggcgagttctgggggaacaactggcggcctgcgctacgctgctgcccggcgcaacgtctctttattactgggaaggacgtttgcagcaggaatacgaagtacaaatgctattcaaaagcaatagcacccatcagcaggcattactgagttttatcaaacaacatcacccttaccagacgccagaattgttggtcttgccggttcgggatggagataaagattacctgtcatggctcaacgcttctttacactgatactgctgctatgcagcgcgctactggcacctcaaagtgctcaggcatctctttttagccaaaacggtcagagccgctttttgccggtcgatcaggcatttgcctttgattttagacaacagggcgagcagctcgatttaagctggcaaattcaccccggctattatttgtatcgccagcagatcaagattgttccgcaacaggcgactcttggcgcggtgaacattcccgcaggccttgctcatagagacgagttctatggcgaagtcgcgattttcaaacagcggctggatttacagatcccgatgattcgggcagagaaaggagccagcgtcagcgtgacctatcaaggctgcgcggatgcgggattctgttatccgccggaaaccagaattgtaccgctgagcgccattgtcgccacaccgcacaccgcagcggaaacgcctgttacgccgccggcacaaaccgaatctgaaccggcctcattgcctttctctccactctgggcactgttgattggcatcggcatcgcttttacgccgtgcgttttgccaatgtatccgttgatttcagccattattcttggaagagaaaaaccccatagccaaggacgaatatttgttttagctatggtttacgtccagggaatggcgctgacttataccttattaggattagtggtggccgctgccgggctacagtttcaggcggcgttacagcatccttacgtgctgattgggctgtcggcgctgtttgtactgctggcgttatcgatgttcggcctgtattccctgcaattaccggcttccctgcaaacccgtttagtcgagtggagcaaccatcaacgcggcggttccctgttcggcgtctttgccatgggagcgctagccggattaatttgctccccctgcaccactgcgcctctcagcgccattttgttgtatatcgctcaaagcggaaacatgctggctggcggcggtacgctttacctgtacgcgctggggatggggattccactgattgcggtcacgctatttggcaaccgcctgctaccgcgcagtgggccgtggatgcaatacgtgaaagaagcgttcggctttgtgattctggcactgccagtcttcctactggaacgcattatcggcgatatttggggcattcgcctgtggagcctgctggcggtggccttcttcggttgggcctttattatcagcttaaaaacgcatcaaggctgggttcgggcgctgcaacttctgctgctggcaggattactgattgcagcccgaccattgcaggattgggcttttggtcacagcgctacgcagcaaacgacgattagccatctcaacttccagcagattaataacctaccggaattacaggaagcgctggcaaaggcgaaaggtaaaccggtgatgttggacttgtacgccgattggtgtgtagcctgtaaagagtttgaaaaatacacctttagcgatcctaaggtgcagtctcaattagccaacacggtgctgctacaggccgatgtgacagccaataatgcggaacacgccgcaatgctgaaagcgctcaaagtgctgggattgccaactatcctgtttttcgacgaacagggaaatgaaatgacgccgtcgcgggtcaccggttatatggatgccgaagcttttttgcatcatttgcagaatagccagcggtaatccacactagcaaaacaccgatgtggaaggagaagcaacgtgcaacgagaagacgttttgagcaacgccctcagcctgttagagcaacgaggcctcgcaacgaccagtctggaaatgctggcagaaaaattatccttgcccgtcagcgaccttcaacgtttttggccagatagggaagcgttgctatacgattgcctgcgctaccacggccagcaaatcgacacttggcgtcggcagctacagctcgacgaaagcctgacgccacagcaaaaactgctggctcgctaccaaacgctgaatgaacaggttcagcaacagcgttatcccggctgcctgtttatcgccgcctgtagcttcttcccagaaaccgaccatcccatccatcaattggcggaacaacagaaacaggcctctctgcaatataccgaagaattactgcatgaaatggatgccgacgacgttgaaatggtggcacagcaaatggagttaattctggaaggctgcctgagcaagctattaatcaaacgtcgaccgcaggatgtggaagtggcaaaacgtctggcggaagacgttctggccgtcgcccagtgccgcaaaaacggcgcgctgagttaagttcagggccagcggctttgcatctatcgcgctcaacccgcattatagtggccctttattttcagtaagactcatagagaattcagaaatggcccaacaaacctctgttgccgaagtgatttattaccacggcgctgtttatactgcggatcgagataatacgatctgtagcgctatcgctatcgggcagggttatatcctggcaactggcagcgatgacgaggtactacgcctcgctactccagaaactcagctaattgatctgcaaggcaagctgatgatgccaggactgattgacagccatatgcacccgttttggggcggcaagcagctacgcggctgccacctgaactatgcggcgctgaccgttgaacagacgctggcgttcatccaacaacatttggatgccgatccaagtcagggggataccgactggctacccgtgcgggcgtggcagcgtcaggccatgattcctgtcggtgcagatatgagccgtgctgcgttggacaccttaaagactcgccgtccggtggtgctgttttccaacgactgccacaccttggccgccaacagccgcgcactggaactgttgggcattgatgaaaataccccaacgccgtccgatggcaaaattgcccgcgatgagcagggaaaactgaccggaattctggaagatgcgcccgcaatgcgcgctttcgacagcattccttccggctcgcctgagcaaaacgtgaataccgccgcctatgtgcaacaggttttaaatgctcagggcgtgacaacggtgatggatacccgcgtatttgccgaacaattatccgcattcggcgcactgcgcgatcgtggcgaactcacgctgcgactgctgggtgcaaaagaagtcactcccgacagcctgaaagggccgcaggatgccggacgagccgttgatgaaattgtcgaatttggtcgccaatggggtgataaaaactggacgccagaaccaggtttggccgttgatcacgttaaattatttatcgatggcgtactccagccgccgacaatgacggcctcgctgctggaaccctatcgtgaaaatcgcggaacagccgagcaaccagactggcagccaaccgaacgttacggtgacctgtactttacggctccggtggtggacgccctgatggtggaatgtgctcgcgccggtatgcatcctcatacccataccgtcggcgacggtgccattgaaatggtactcaacgccgttgagaagatgcgtgaagcttatcctgagaaggatattcgtccgggcctggcacacaacgaattggttgcagcccatcaatacgaacgttttgccaaactgaaagcgacggcggtgctgtcattccaatggtgtggtttgccgggagtgttgatcgacgaagagcgggaaatgctgggagaagcgcgtttccagcatatggaaccgaccgcccgtttcctcgatgcgggcgcgcgtctggcttatggcagcgactggccgattgatcgtctggatgagtggtataaccttcaggtgggaatgactcgtcgcgcgtgggatagtgaaggaaacccggctggcccgcgtttagataacgaccgcgatttgacgttaatcgaagtgctgcgagcggcaactattgacgctgcctatatgattgccaaagaacaatacattggctcattggaagtcggtaaatttgccgatgcaattatttttaaaaataatctgtttgaacaaccggcggaaaccatttatcagaccaaaatcgaaaaaacgctgatcggtgggaaaatcgtttaccaaagttaatctaaccttataaaaaaggggcagtgctgcggcgctgcctttttattttaggccattaccaccctttattgaacattatcactttgtatttcaatagcagaatataaatgccggtcaagttaaccaaaaacaccactttaggatatctattattaacattgattaattttatatattcccaataattagaaagaaataatcgcgttatcgccctcctgcgctaaattaaaattcatcgtatttacccgaaaaaaaccgcggccttggctattattactctccgtactcacgctgagctttccaacccgtaccccctgtgtcaaaatccgctccctttttatatttgaacaccagaacgacggtatccgttgataccaggagatgatagggtaatgccacaaaatattcagttacgcagagttcttaaaacgccagccttggtcgccttcggccttgcttatatggttccgctgggcgtattcaccacttacggtcaggtgacggttctcagtcatggccacttacctatcgcttatctcatcacgatcatcaccattttatttactgctctcagctattgtcgtatgaccagcgcgctcccgctggctggctctgcctattcttacgtacagcgctgttttggcggtaaaaccggttttctggtgggttgggcgcaaatattggattatctgttcctgccgatccttaactatttagttttaggtatatttttacacgaagcattcccggctattcctgcggcagtctttgtcctgggttcgatcgtcagcgtcagcttgctgaatatcctcggcgttcgcttgctaacgtcggttaatttctcgctgatttcggcgcaaatggtctttatcgttctgtttttggcactatcgttcagccaggccgatctcagcccggaagcactgttaaagccgctgttggtgggctcatctgacttttccggtctgttatccggcgcggcggtgctttgtctagccttcctcggttttgatgccatagcgaccatggcggaggaagcgcatgacgccaaacgcacgctgccacgcgctattctgattaccgttatcgcagccggtactatatttatggccgtttcttatgccgctcaccttatctacccagactggaaagcgctgattccggtacaagataccgccagtttggtgatatcggaaaaagtaggcggcaagtggatgtacaccttctttatggcgacctatctgaccggcgtatatgcctctgccatgacggctcagaccggggtttcacgcatcttttacgccatgggtcgtgaaggcgtgctgccacgcaaaatctttttccatcttcacacacgtttccacacgccttatcgagccatcatttttgtcgcgattatctcgctctccgcactgttcctcgatttgagcatggtggtatcaatgattagcttcggcgcactcggcgcatttaccttcgtgaatctcagcgtggtcaaacacttcctgatcaatgagaaacgccgcggcaccagcgccatgattaagtatggcctgctcccgatgatagggtttgtgatgtcggtgtggctttgggtcaatctggagccagacgcactgaaggtaggattgatatggttggtcattgggtttatctatctggtttatctgaccaaaggcctgcgccaggcgccgccttctgtcgatcatgatgacattgctcacctgatagattaagttttcccattgaaccaaacagataggccccgcattgaccgtgttcaagcggggcttatttcgtttatatgactcattctcgctgtggaaaaaaccggaatgttaaccagccgtcgaattacacatactgatgcaccttactttgtcgaagtagacaaactgtatgaaagcgccttcccccgccatgaaaaacgcactcctaaagctaaaaccagcgcgttaaacaacgataattatttgttacttgcctggttcgacggcgaactatttgtaggaatgattggttcatgggcgtttaacggttatacctatattgaacatctggctgtcagtagccagcaacgctcgcagggatacggcaaacgcatacttgagcaatttatacgacagcatccggtgattattctggaggtcgacccactgacgactgaaatcgcccgtaagcgcctgcgcttctatcaaggactcggcttcgtagaaaacagcttcgagcaccgccacccccgctatcatccggatcttgacgatcacgaactggtggtattgagctacccagaaccaatcagccaagctctttataatcaatttaataatgagcttatcaacatcgtaatgggcaacgtgtcgtccctgagattttgagaaactcgcggcactatgtcgctcagcgcccaacaatgagcgataatgcatcaaaaccagctaaaacgctgaaacattaggcaggcaatcaagaagtggaaggatttacattgacgagccaacggtaatcgagtttaatacgccccgttgcccggatagctcagtcggtagagcaggggattgaaaatccccgtgtccttggttcgattccgagtccgggcaccatatttagagaaaccagcctacggctggttttttgctttctggcatctggactcttcatcgaacacgttcgattattcgagccaaaggctctcacccctgcggggccgtcgcaagcgacgttcaaagccgcctagcggcgttgtccgagtccgccaattactctatcgacactgaacctacttcagagtgacccaatagatattggtttttaattcagcagaattaagaactctactatctggaaatacagatactgtaacagcaatatgtagtctatatatttgcatctatgaaaccattaatgccattgataaagcccattcttttctgaacggtattgagttggcgacatattgaaataacttttaaaatcctggcagaaagtactctgactagggaacgccatatcctggctgatttcactcactctcagatttgtctctacccgtttatccgcggataaaataagtcttttccaccgtctatatttggataagctcatgcctatttcgctttggccttcaagtcaaaataagatttagagtatccagccacagcaataacgtccgagactttgattcccagatgaatattgacttatacccaacaaaaaatgtcaggaaaacttttaataaaaaaattttttggcataggtcatatcaagacatgagattccctgttgattaaaagaaaaaccaatatattgtcatgaagcgaaaactctctacttcgtattataaatcgaataaataattatgttagcggtttatcaggcagccttaaataccgcatttactctttcttcccacagcattactaccggtaatacactcaatattttcaataaataaaaaatgttattagctgctatatttaaaaaataaaagtggttatcaataagtgacaataaagttcggtagcctgaatagcaagcctgtctatcaatccaaatgagctactgtttttaactgactctcgttataaatacaaacttcatcgaccagaaaacagtgataagcacatcgctggtaaactctgcaatacggctgttgacgcctcagagctataaaacaaaaaaaccctccagaaataaggagggtcagtggaaatgacggaacgttggaggaaaagcccaagcgcggtatctccgccgtgttttacctgtctgaacgctaaatcgcccctaaattcagatataaaccagcagaaaattgtctctcacgcgtttaacaagctgcttctacggtttctacctctctttgtacataaccaagacggatagcatcaagcgcaatcattttctcttcattagtcggaatcacagcggcgatgactttcgacgccttagtggtaataacctgagtagcaccgcactgtaattgagcattcttcgctgaatcggtctcaaaaccaaaaacggccagatgctccaatgttagctgacggatcaacgccgaattttcacccatgccgccagtcaggattaaagcatcaaaccgccgcagcgaactggcgtgtccgccgatatgtttggcaagccgatgtacaaaaacgtttatcgctaaacgtgcccccgcatgcccttcacgataggctttctctaaaacccgcatgtcgccggataagccagaaatgcccaaaagcccggattccttgtttaatacatgatccaaatccgccatattttgtccggttcgatgcgccagataagctagtgccccgaagtccacatcaccgctacgggttcccataactaaaccttccaacggcgtcattcccattgatgtatctacgcttttaccatcttgaatggcgcaaatagatgcaccattgccgaggtgcgcaataatcagaccatagtcctgcttatcaaatccgagaatatcaacggctttactcgccacatagcgataagacgtgccgtgaaaaccgtagcgtcggacaccttgctcgcgaaaataacggtaaggcagcgcgtaaatatatgcctccggtttcaacgtttggtgaaaacctgtatcaaaaacggccacctgcctgatgcctggaaatagctgacgtgcagcctcaataccatgcaaatttgcgtagttatgtagaggagccagtggtgaaactttttttatctcatcaacgacgcgatcgttaattaacactgattcactgaatatttcaccgccatgggcaacacgatggccgattaagacaatagatttatccagtccgcactttgctaactcatcggaaatagctgtcaacgcatcagcataattgcctttacccagttgaatcttggcgtttttatcaattcttaaaaaagaggcttcggaaccaataccgtctgcaattcctgacgtgatggcttcacaattactcaggttcaggactgaaaatttaatcgatgatgaaccgctgttaataaccagaaccgtagggtttaaagtcatgtcattactccgcccatgtattattgagggcaagttgagggcttttagcgccatacttaaactaatttgtagacgatattaagaatggtcagtagaccgacgagagtgacaaagtagttttctgggcgacctctgaatcgagccagcgctggcagtttatggatggcatacatcggcagcagacacagcaatgaggcgataattggtgcccccatggcttcaatcaaatcgaggatattgggattgatatatgccactatccaggtcgatcccataatgaaaaccatgctgatcagatttaacctaccgctggaaactttggttttatcaccctgataaccaaatttaacaatcaaaccatttaggccttctagcgtgccgagataatgcccaaagaaagatttaaaaatggcaaccagcgcaatcaacgaagcggcatactccagcgtaacggagaaagctgactggcctcccgccatggcggaaaaatggttagcgagataggacagtacgggaatattctgtaccttggcctctgccatattctgaggcgatagcgcaaataagcagctaaaagcaaagaacataacaaccgcgaccattaacatgctggctctgctaataatctgagaacattttttctcagtaaaactacgaccgaattccggctcatattcttcacgttttgatacaacaaaagaagaaacgatcggtgagaagttaaaggaaaacaccatgatggaaatacccagccacaccgttaccagtattccgtcatgtccgaacagagaaatatcattgacacccacctgctcaataaccgaggtattccagtaaggaatcaacgaaactgaaataagtaccaggcaggcaataaatggaaataccaggaaactcatgaccttaaccatgagatctttgccaaagtaaatcactgcggacattaatagcagtaatcctaacgccaccaaacctcggtttagcggaaccaactgaagctgattttcccaaaaggtcataaaggtgttggtaatagtaacgccgtaaatccacagaagtgggcagatagcaaaaaagtaaaggaaggtaataacgacgccgccggttttaccgaagtgctcttcaaccgtttcagtaatatcccctgaacaattttttcctgacaaacacaagcgagccaatgagcggtggcaaagaaaagcgattggataagccaaaagcaacatgattaatattggaataagcccgccaatacctgcacgaatagggaaaaatagaacgcctgcgcctatcgcggtgccaaataatcctaaagtccaggttgtatctgacttacgccacgtttttgttttgactggtgttgatatagcattatcgatatccattaataaattccttattaagatattttacgaaatactgcttaaccccgtaatttgtgatactcgtgataaatcaatgttgccgcctgatataatgctgacggtctttttgccggtgatatagtcttttaactttccgctcagtaatgccgctgatgctaatgcccctgcaccttcggttatgattttgttacgttgaataaggtcgatcatacttcttcttatttcatcttcgctgaccaagacaatgtcattaaccagcgctttgactatttcaaaggttgcattacctgggcgcgcgacatcgcagccatcggccaatgttgaggttttacgatgattggtaatactaccgttataataagaggccgccatgccatgaacgttttccgattgtacgccgataatattaatagtcgggttgactgatttgatcgccaaagcaataccggcaatcaaaccaccaccgccaataggaacaatcacattatcgacatcgtaaagatcttcgagtatttccaaaccaatggtcccttggccggcaatcaccttttcatcatcaaagggatgaatgaaaattctattctccaattcaataatttcactggctttggcgatggtgtcattgaagttctctccgtgcagtatcacctgagcagaatattcactggtcgccgcaatttttgatttcggcgcacaatttggcataacaactttgctgttaatgcctaacatggcgcaagataaagaaacgccttgtgcatggttccctgcggaacaggcaacgacaccctgttttttttcttcttcagtaagtgaactgagtttattaaatgccccgcgaatcttaaatgaaccggtacgctgcatgttttcaaatttgaggtaaatctcaccatggcaacgctcgctaaggtaatttgatctcgccagaccggttttatagatatgcccctttaatcttttttgcgcgctaatcacgtcgttaatcgtcatttttaagtcattgtaaattttcatgtttatagccctgatcaataataattcaaagaataatatatataatagggctggatgctacggcacgaaaaactggattaatgtgacggaaatagcaaaaagaagcggttgatatctaatgaacagtggtttatttcaagaaatgcaacggagtcgacattaagagagaaattagttttatttatctgaaaaggtgaggggaattaaatttcacttaaaaaacgtttataaccaaataaaatagacaggaaagcagcggaagagagccatgaggtaaggaataagaataaatttaatgaaaatcaaagccgtcaggccaaagttttttactatcataatattttatcgctatgcctcactcaatgttaataaatggttgtgtttatgtttaaatataacaaacctacagttttaaccataaagtcggatagataataaaatgtgataacgatcacttcattattcataaaatttttcagtaaaacacatatcgtcacatgtaaaaacaacggaaatagcacggtataaatcaagagcaatactaaaaacatgcctattcgcttttattcattcacttaccaaattacacaacgcttaacttaagataataaatatatcaaaataaaattaatcaccaacaacagataaccaccgcaaaagtaatgtaaattacatttttcacaattaatttaaaaacgctgtaagaataataaaattaaacacattattatcataagcataaatgagcgaaaaacataaaaataaaatacaaataaaagagagaataggcactattaataacgatagaaaccgatgggaaaactaatgcttgtaaacaatacttataaagcaccccaaaactggtcgttgcctaagtcagaagctcttatttcaggaggaaatgcatctgcatcttcaatatctaaatttgatatacccagactagaagaaataaaaacgctttgtgatcaaggctgcataggtatagtgcctgagcatctaattaaattacaggtatttgctcaagaaaataattgtctgataggtatcaggcccgtggatgttatggcaacagacctgatcaaaaatggatacccaaccaagggttttcatattaagggaaaaagtgctaactggggccctcaggctgcatttatctgcgttaagcaggagctgagcaaactggtagataagccagataaaattgcgttatttaatcaacaaattcaagcctgcattgacgaaggccacgcgcaaaaagtaccgctggaaataactgcagcaaggttagatatcttgatgaagagaaatatggttgatattcagatagatgctaatggtttccccattgcgctggatgcccgaacccccagtggaaaactgtataaatttgagctgataccagtaaaagaacatgcggatttatatttagttcaacatcatggagagaccattgaggtgctggcaccgcccggtgaaaataaaaaaccgctgaccgctgattacgatttattgatgattgcaccacacttacaagagtacggggctaaagataatctcctaatcaaagaggtttcccacgatgtattcaaacgaaacatggatgtttataagcgtcgtcgtcatagcgaggtagttaataaatattttcaggcggaatatcttgatcccgctaaattttatgagcgggaagacagcaatattggcaatgtctcaccgcgaatccgcgcaatgataccacttataaataaagctatggtgggcgagggtgaaccggttgtccatcacagcactgacgcaggcagcccggcaagcgacatagcggcaaatttccccgcgaccttcgtgctaccaaagccactaggaaaattgaatgatatttgcgtgataaaaaatatagatgaatttaaggagttgatcatcgccgctaaaaacgaaaactattacattccggtcaatccactatggccaaatgaagtgacaaaaatacgtagcgagagtttttcctccgttattcgacgttttagtcgttaaagtaataaatacggatgatttctaaccttttatatatgacgtctattttccaaggcgaatttttttatttattcgcaggtttttcgcacattaaaagccaccttcaaagaaggtggctaaccgacgatgaaattacttcgctgggcttagggtaaatatttttgggtttcttcctaaccattgagcggctagtgcattgacctgttctggcgtcaccgcttccaactgctctgcctcttgagccagcagggcgaaattgccgtcatcactaccaacctgagccaaggcatcagtccaataactggcactgtttcgcccttcttcctgctcaattcgccaagcttttttggctttactcagctctagcggactgattccttcttctgcaacctgcttcagcactttctgcgccaactgcgccatttcttctgccctttctggcgcagaggtaaagttcaatcgagccaaataataaggcgttggcaacttggctaccatttggctaaagcccagagtataaacgccgctggcctgttcccgcagcgcatagcgcaagcgtagagaaaccactttatccatcagttgtaaggctagctgattcggctgtgaccagaccgcatacgatgagaattgcatactaaccatagtcttaggactactggctaatgggtagtccttcgacattgcacgattcagcggcttaatgcccaaatcacgccaatgtagtcgctgctcggtagcaggaatacttcccatccaacgttccaccagcgtttgcaacttcccttcatccaaagaaccgctaatagttagtgtcatatcctgcgtggcggaaaatagctgacgatggcgttgctctagcccttttatattaaagtcgcgccacggcccgttagctgtcaccaataagcgatccccatgttgatagccttcctgagtcatgctatcgagaaaacggcgctctaccggttgcttatcaatgcccaaagcataggactgcttctgccgctccagcttttcgccggaaaactgaggcgcagtcattttcaagtgcagcaattgcaatagggattccaaatgtgccgctggcgcagagccgcgtaaaccgtggaataacatctcgtcgtaaggcgtcagcgccaaatcctgctgtttactcagttgagccaactggcgcgagctgtattttccgtaaccgctggcttccggtaagcgcatcgcccagctaacctcactgacctcattctcatcttccaacgaacgcccaccgggaatacgtaatgaaatctgcacattatctttcattcccgcgtccgatttaacgatcacccgcattccgttgctcagcgtccacagttgtgtattggcgataggcaaaatctggcgctgtacaaccctcccggccaccggcgtatctagcgttaaagtcaccgctttgggttttagggtgaaagcgcccagctgggtttgacgagttgcgttccacaacgccgcgatagctttactatccacctgttttttatccgtatctggaccaattaaagctaatcgtactgaagcggtatccagcaattccgccacctgcgcctgaacgtgctgcgggccaatcgcggccagccaggtttccgtcattgctagctgctgctgtttatccagcatcggtaaattgagttcaaccgccgtagtaagattatctgcaagataaccaggctgataacggctttcaccggcagcctgctgacgcagtttggttaatatttgctgacgcgctgcattcagttcttctgcactcaccggcgtgctggccatgcgctgtagctcggtaaatagctgtttcagcgttccgttgtaatcactcccctgcgggcgagcgattaataaatgctgaatacgctgattatccagcaaagcgggctgctgattaatgctggcaaccgagagcatctcgttatccaccagcaatgataagcgctggttaaagatggtcagccacaaagtatccagcaaatctcgccactgaccgttagcgctatttaaggaaaccggcaaatcacgctgtaaccccaactgaataatgcgcgagccttgttctgcatcgaataattcactgattaacatgccaggctgaggcgcaaatttcttccaatctggattatcctgagccaacggctgggtagcaggaacggagaataacccagtaatttgtttacgcacttccgtagatttgaagtttccgacaatcaccagagccattcgctgcggctgataccattgttgataataagccacggcttcagataccggagcatgctgtaccacatccagcaaaccaataggatcgcgttgtgcatagcggctaccgtaataccgtagttgctccagtgactggttaatacggaaacccacgccctgacgcaaacgccactcctccacaatcactggccgctctttatcaaaagcttcgggttcaaaactgatacctgtcgcccaatcggacaaaatccgcagcccgagctgaatttgcttttcctctgcgttaggcagagaaagcttgtaagtcgtggcattcagactagtcactgcattaacgtgacttcccaaggtaataccttgtttttctagtgatttaaaactggaagtgccggggaaattacgcgtacctttgaacgccatatgctcgacaaaatgcgctaaaccacgctgtttttcactctcttgcaatgaaccactgttcaccagcagccgcatttccacgcccggctgcgatcgcgctagcaaataaacctgtaggccgttatccagcgtgaagtgctgcacatcactgcgaatcggcaaagactgcccgtcagatagctcggtttcacgggttgtcggcgcgcagcccaacaatacgtagacaagcgacacaagcactagtcggttaaacatggtgtagcaactccttgagaaaaaacagattttacatccaggtacaagcgatggtcggcgagatcggccaggaatgtctggtgacttaccagtaaaatggcgctgtgcggcaacgccgaacgcagcaaccgcagcagatggcgcgcgctggatgcatccagcgccgaggtggtttcatccaacaaaatcaaccttggcttattcaataacaaacgggcaaacatcagccgctgctgttcgccgccggaaaggcgctgttgccacgccgtcgataaggccaattgataaatgaactgcggcaaaccaacctgtgtcaggacgtcccgatactgttcatcgctaaaagcactgcgatccgctggatatgccagtaaatcgtccaatcgctcatgcgccagatataaccgctgcggcagccagctcacgctggcgctgcgggtaatctgcccgcggtaatgtggccaatggccgctgaatgcacgtaataacgtggatttaccaatgccggatcgtccctgaatcagcgtcaggctacctagcgcagcctctacgaggatgcctcgcagcagtgaatttccatcggcagtttgtaaattcaagctggcccgtagcggcatcgcgtcgtccgaagccgtttctaccgggctggacggctccgcttccagcagcaccacaaagttatacaatcgggttacggtggcctgccaggcggcaatgtcccgataggagaaaatgaaccagcctagagcacccgccacctgagcgaatgactgacggatttgcatcaatccgcccaataacagttcaccggcgaggaattttggtaacgcgaaaaaaatcggcgccaatgcgctaagctgctgataaccgacggtgaagaacgataggtttttctcatagcgaatcagctgataccagttatcggcaatggcgtgaaaacgctgtagcaaagccgctcgctcgtgcaattcgccgcgttggccagcaatagcgtcgctggcttcccgtcgggcaatcagcccactgcggtaatcggcctcacgacgctgtttttccatattgagctgacgcagcggatagccgatccagtgggtcaggccaatgccaatcaaggtgtagaaaatacacacccagaacatgtaaccaggaagggtgaaactgtgggacggcagggaaaaattcaggctgccagagagttgccataaaatggcggcgaacgacaccagcgtcagcatggaatgcaggaaggtaatcaacagacgcaggctagattcaatcagcaaacgcacatcctcggcaattcgctggtctgggttatctggctccaatgcgttgattttcagtgcatagtgttgcccgttgcgagaaagccagcgtgccagaatatattcggtcataccgatacgccaacgcatgattagccgttgcttcaaataatccgcaaacaccaccaccagaatcaaagcgctaaccagcacgataaaatgctggagtaactgatagagagcctggctgtttagctgctgtagcgcattgtaaaaatcgccgttccactggttaagacgcacattaaaccaaaccgatgataggctgagcaccagcactatcgccaatagcaaccaggcaaaccatgcggtgccaacgccccaaaaaggcctagcgagataacagaactgttttaacgttttcatcaatcaaccgatcttgtactgacctaaaaaccaaaacgtctggctgcctaagccgcccgactgcgttcagtgacttctcaacataattacaggtcgtaactcagttgcagccagaactggcgccccggttcataggagtgcaacaccttgtcttcatacacaaaagtgtccgccacgttgcgtttgttcagtacgttattcacctcgaccgagatccccgcaccataggcaaaatcaggtttccaggtcactttggtgtcccagcggtaggtgctggcaaagtgggtcttctcgtacttcaacatctgcgaaccggtggtcggatcggtgtaataatcttgctggtagcgtaccgcctgatcccgcgggccacgccattgcagcaggttatagaaggtcaggttgtgttcctgccaatcactggtcagctccagattgaagcgccacggcgagttaaagttggtggagggtaaatcggaagcgttaatcaccttgccgtcgtaccagactttatccgaatccagcttggtgcttgggtcgaagaaagcgtaaccctgatctttcggcgtattgctcttactttgctgccagctcagggaaccggtcatagcatgagacaacgcaccagtttcccacggctgattgttgctcacggaaagtgaaaccgtatcgttgctgctgcggccgccgttatcaaaggtacgaatgcgcgactgcaaactattaccgctgttcggatacttagtacggctgcgtacctcgtcataaccttcgcggtgaacatattgcaaacgccactgggttttcatgatttgctgttgcagagcgaggcttaactcatcgttataaggcgttgaaagtttatcgataccttcgaaatctttcacgtcgccccactcaacctgattgggatcgcggtgacagtcgtagtagcaattctgcataccggcgttttgcgcttcatacagcgcataggtcagcattgaacgaccatagtaacggttagccccagcgatcagcaccgtattaccagttccgaaaatatccaaactgctgctcaaacgcggagcaatattggtctggccgacaaaatcatcccgatccacacgtacgcccggacgcacggtcaaacggccatactgcatgctgtcgtcaaggaacagggcgtagctggtgtaatccgctttataggttcccgcgcgaaagcgggtgatattgctgggctgagcatctgaagtaagccagtctggcgatccgtagaaccgatagcggtagtaatcccgatcccgttgatagcgcgcctcggttttattaacttcaaaaccaacgtttggcgagtggaacatccccagcgcctcaaattgattaaagcgcagcacccctttcgccgtggcactgttttgtcgggtgatcaagtccccctgcccgccattgttgtaataacccgtattcggccagtttgaataatcttccagggcgaagaaatctttcacatcattggtgcgctcatccaccagcttttggtaaccggcggttaaatccaggttggcaaaatcaaagcggtgctctaactgcaacgtcgtgttcaagccattatgatcgttatcgtagcctgaattgattacgctgctggaaaagagcgagctggtataggccgagtaattgccggataaatgcaggctggtacgctcattggcatcccatgagaacttggcgaaatagttatcagacacccgtttctggctgcggtagccgccgtccattgagacgccttccagctcattattcggccctatctgtaaaccgctgccgccgctggtataagtcggaatatccgaaatacgatgcgaggcagaaaagactacgcccagattatcggttatgcccgcttcaaaccaacccccgaagttctgtttactgtatttcggctggaagcgatctggccgactggtgtcattctttgagctgtcaaaagcggtgccgggatcggtaaacaccttgttccacgccgaacgggtttcgcggaaatataaatgtgcgctgttatcaccacgccagcgacggctggtgacatccagcgtaccgccggtaaaaccaccatattccaccggaatgttgttatcgaacacagtcacgctgtcgattaaacggctatcgagataaatcccctgatcgctgctgtcaacgcgggtcgtggtttcaccattgccactgctggccggatcgacgtcgttgttaaagctcacgccatccagtttgtagttgttttggtagctggaagaaccgtggatagaaatcgcactcggcttgatttccccttgattgagactggtgttaccgctgttagaaaactgtaccgccggattggtacgcaataattcggtaatgttaccgttgccggtagtgcgctggcgaatctcttccgaagtaatcacctgcggggctgacatcagattatccgctgcccgaccgctggtttcccccatcacagaggtagtcggaagaataatagcgccggtgttagcacctttcatcgtcggtggacgaataacaaaaccgctaccgctgctaaccaactccaggccgctgcccgccagtaattgctgcaacgcagactgcgggctgtaattaccatgcagagcgggcgctcgcaggttacgcagctcggattcatcgaataacacatgcagttggccttgctgcgccacattggcaatagcgttggctaacggttgctccgccatattgagctgtaaatcggcggcgcctgccccttgactcatcagcagcgttgccagcgccagggcagaaagaacaggcatcccagaaggtttctttttgttgtaagtcatctcgcaatttcttccctagaaaataaaaatgccttgccaatgggcagaggcatcagggaagacgagagaatgagaattatcctcacctatgaaatgaattattttttacttttgctgcgggcgcggcaaaatcaacgcgttaccctgagcgtcctgtacaacattcaccgccaaaagcagcggtaaagcgtttaagaactcatccggattagctaaatccagcgaacctgaaaccggcagcgatgccaagcgcccgtcggtcaactcgatttttcctgaccgatagcgcgccaactctttcagtagctcgcccaatggccgattgcggaatgaaatttgcccactacgccattcgccgacttcattcacctgccgctgacctcgctgtagatcgttttcccctttcagcaagcgcgctgaatctccggcatgcaacatcacggtttccatagatggccgcccggtgaccgctacagtaccttggcgtaccgccacccccatttcatcagcgtcatagcggacgtcaaattcggttcccacgacccgcacctgactttctccggcatagaccaaaaaaggtcgctgcttatttgccgccacctgcaaatacacctcgccatgatccagccagagttggcgttttttcctagcgtagtgaacacgcattttagtatatcgattcaaatgcacgcggctgccgtcggacagcaccacttcacgagcataattatcggtttgcagatgaatatcgtgcatcagcactagcggcaactgactggcaggcaaccacagagcaagcaaaaagaaagccccagcggcacaggcgcgcagcggacgccaccagctcggttttgccttaggctgcgcagcactcgccgggcgcgtaatcagggcacagtccccccagatttgctgcatctgtcgaaaagcctcagcgtgagccgcagagcgctgtaaccattcctgaaattgccgttgttccgcatcgttaaggcgacgcccctggctgcggctaaaccacagcgcagcctgttcgtcgatttctgtttccagaaggcggctagcgtccgtcattgtgctcactctcctgttccgctacgtagcgtttacaatgcaccaaggcaccggcaatgtgcttttctaccatactgacagaaattcccattctctcggccacttcaatttgcgataaaccgtcaaagcggtgcattaaaaaagcctcccgacgacgaggagaaaggctttgcaacgcttcctccagccgatttaaacgctgttggtgttcgaataaacgctgcggttcggtttctgtcggcgcaacttcctctctacctaggctatcttcatgattttcagacaataatagccgctgctttccggtagcacgccaatgatcgataagcacccgatgagcaattttgaacaaaaaggcgcgcgaatgctccaccggtgtttgcctggcacgtttcaaccacagtgtgaatacgtcctgtgacaagtccttggcatcgctggcgttatccactcttttacgaaagaagctaaccaactgaccgtaagtggcctgataggccaaactcaccctgtttgatgggggtttatccatgaatgcatccgttaaagtcgcgcggtccttttgacctgtgccgttcaggccagcataggtattgaagccgtcaggtacatcaatccggttgcccacatctggctgtaaaatagcgttccacaattttctctgctgattcggcggatactcgtaggccccgctcttctgaagctggcggttataagcaaaactcggaataaatgcaaatgataatgcctataactatcaatatgcttattgttacgtataatccgcagcttggctgtcggtgttattgagtgcagggaaagtgataaatatcatcggcacggcatgggcagccatttataaaaagggtttataatcaataaaataacgccgagaatacggcgttcgcggagtcggtaatgaaatcattctacccacagccagcccatagccacggcccaaccactgcagcggctcactttacaccacacacttttggaccgccggaaggcaacccgcgcacccgctggaccgccagtttactgctgggcttagcgctacatttactggccgcagtgttaatgctgggctggtggaatcggctttcacctcagggcgcgttgccaccggcagtaatggtagaaatggcgatttttcagcaagctaaaaccgcgccaactgacgtaccacaaggtgttttgcagcaaatggcggcacctgatgacgttcagccggtcaaaaaggagttgctggagcagccgaagctggcgctttctccccgcggtactcacgcgattcggccggagaaagtcgatagcaagaaaaaaccggtagtaaaaccgaaaccaaccgaaaccccgttgccggtcatagccgaaaataccgcatcaaccaccagcgccccattgcccggttcggccaagaaaaacgccgccaacttttccagcgcttcttccgcggcaatcaacggtaaagccgcatggcaaggggaagtattagcccatatcgatcgctataaacgttatccccgagaagggttacgctatcgtttggaaggggtgagccatgtgcgttttgtggttgatctgaaaggaaaagtgttattagcagagctgatcaccagttccggcgccagaattcttgaccgcgaagctatgacgttgatttcccgcgctcagccaatgcccgcgccaccggcagacattctaaacaacggaactatcgaagtcatcgcccctatcgcctacaacgttaaaggcgcttattagtgagcactgcgcaaggccagaatggtcacgcgcagtagccagtcacctaacaaagccaagggcgtagctacctttgaataagataacgaatggtcggcccatcctgctgaatatccaacactttatagccataattacgtgcatccagcgggatattattgatcgattgtgggcaatcgctgatcacctccagtatttcccctggtttgagctgcggcatggcttccagcgtagcgactgctggatatggacagggctctccgaccatgtctagtcggtaatctggaactatcggttgggtgctcatagtgattccttagataaaattggcgcggcagctttacgactgcggaagaagcgtttttcccaccacaacatggcggcaaaagcgatgcctaataacagataggttatcagcagccctccgattgggccgaaggtgtccagcagattgactttgtcatggtttgtcacgagcactggggcaaaatcatcccagtaatatgccaatagagtggcaccgataacgttgcctaaaccgacccaccagtagtgaatttgcccttctacagcacgatacatccagccggtttcacagccaccagctagcacaatgccgaaaccgaataacaggccaccaatgaccgcatttggccctgcccacaggattttcggcgcaacacccagttgaacatagctaaagataccaatagcgctcaccgccatgccgagaataatggcttttgccatatgggtacggccagtaatccacagatcgcgaaaagccgatgtgaagcaaatctgcgcccgttcgatcaataagccaaaaccaatgccaaatagcatagcaatgccgagtttaggcgcctggaataattcggttaacgcccagcataatgccagcgcgaataccaccatacccagacggaaacggcgctttgcgcgctgaggattttgcgttaacggtgctgctgcgctgactttctgcaatttcaccggaatacggaatattggtaacagcgtaaattttgccccgaaataggagccagccgccgttgcgagggcaaaaaaccaagcgtgtaatgaaaattgaggaataccagtaaaaaatgcagctaaattgcaccccatagccagacgagcgccaaaaccggcaataatcccacctaccagcgcctgagcaattcgaataccgtgttggggcttacgtagcttaatattgttagcccacagcgccgcagcgatacaaccggcaaacatgccgataatcatcattccgtcgatacggtccagcggcgtaccttcgaaacctataactttaaagtagccccactcctgcgggttagcgccgaaccactgcattacatgcccgccccagcgtgtgaactctccggtcacggcccaaaaagtaccggtcaggccaaaatagtaggtcgataagatccctgcggcgatcaccgccggaagcggtgcccaaaatcgcaccaaatattcggatttaaacgactgccaggtcatgcttcctccacgcaatattcatcccccacgcagcgaggtttgttatcgccgatggaataaaaagttaaaaagactcgcaatgataaggcaatttaaacccacagagtatttaatcctgcatagtttgtaaggtttttgtctttcccgccacgcagtggagcagggatctattattgagaaaggaaagttacattggtgcagaacagaaacgtgaacgctaaataatcgggtttatcgaagagaaatagggtagccggtataaaaaacccgcggcgcacattcggcaaaccgcgggcttcgatccagacaggagttaactaaccttggctagctggagtttgttgttccgcgaagaaagatttctcatattctcgggctttcttccgatcaaactggtgttcccacttggcaatcaccaatactgccagtgcgttacccacaacgttcaacgcagttcgcgccatatccagaattcggtcaacaccagcaataaatgccagaccttctaatggaatgcccacgctgcctaaggttgccagcaacaccacaaatgacacgcccggtacccccgcgatgcctttggaagtcaccattaaggtcagcaccagaacgatttcctgaccaatagaaagctcaataccatatagctgcgcgatgaagatcgccgcaatactttggtacaacgtagaaccatccagattaaaggaatagccggttggcaccacaaagctggtaatcgactttggcgcgccgtaggcttccattttctcgatgatacgcggcaaaacggtttctgagctggcagtagaataagccagaatcagctcatctttcagaatgcgaattaacgtccagatccgcagattacaggctctggcaactgcgcccatcacaaccaaggcaaagaaaagaattgcggcgtaaaccaatatcaccagcttggcgagcggaagcaaggcggcaaaaccaaaattcgctacggtcacggaaatcaggccgaatacacctattggggcgtaacgcatgatcatatgtgtgactttaaacatgctctcagaaacggctttgaacacgttaagcagcggctctttggtttcttttggtaaagaagacagccctaaaccaaacagtaccgagaaaaaaataatcggcaacatatcgccattggccatcgaggagaaaacattcgatgggatcagcgatagaatggtactcaccagactatggctaccgctttgtacctgcgccgtggttttttcatactgagaaatatccactgcggttagcgtcgacatatcgatgccatgacccggttggaaaaaattggccaaagtgataccgacaataatcgcgatagtggtgatcacttcaaaataaataatggtcttcaggccaattcgccctaatttctttgcatctccaacgccagcaatacccacaatcagcgttgaaataacaataggaaccacaatcattttaattaagcgaataaaaatatcgccagcagggctgagaatattactgactaaccaatcacgagactcggcctgattatggagaacagcaccaaccagaatacctaatacaagcgcaattaggatttgccaagcaagacttatttttacacttttcatacccaaaaaaatccctcaaagcattccccaaagcgcatgatggacatgcacttcagatggaatacttaatcattaaatacggggctatagttaataaaatccgcggatcggcctcccgccagccgtccaccttttcaatcagtatcatttcaacccgttgttctgcaagccttgtttactctggcttaacccactacgccgagtatcttttggtaggaacaaagagtgataagccataaccaactgttattaaaataataaatttaaaccatagcaaataagcacttcacccttaggtataaaaaataggcgaaattaattagccgataaaatcagcggcttgttgtatttaatgccttattttgttcgcattttgttaaatgggcagtatttcgattttctacctattttaggtattctgcaaccaaagctcccaataaattcattcaaaaatgagaaaaatcatgattaatcgaacaaatctttgctgcataactatgctgttattcttaaactcgttttttatttccattaagaatatctactgactttaaatactattaagtaataataaaaatctaataatcgacttgctctaatcattatcagaattatttttagataaacttcctgccattattgcgaatggattttgtcttaatcgttattcaaacaaagaagtcacctatatacacaatcacggtgtaatacttctttcgctgaaataaatggcacacaggagtatttcatctgatcaaacttcaattctcgattaaatcccttccctattgagatattgatacaccacacagcacatcaagtaagtccctaaaacaacatcttttctgcgtgatctgtcgcccaaaaaagaaacaaaacgacgcccaacactataattaacctttagttgacatattattaacaatctaaaggagaataaatatgagccaactacctaaacacccaattcccgctgcaattgcagaaaatgccctgatcaacccagtccaatatcatgattattatcaacaatctgtacaaaaccccgatgcattctggggcgaacagggcaagattatcgactggataaaaccctatagtattgttaagaacacttcatttgatcctggccacgtcagtattcgttggtttgaggatggtacgctaaatttatccgctaactgtctggatcgccatttggccgagcgcggtgagcaaaccgcaattatttgggaaggtgatgatccaacccaatccaagaacgtcagttataaacagctacaccaagatgtttgccagtttgccaatgtattgaaaaaacttggcgtaaaaaaaggcgacgtagtggctatttatatgccaatggtgccggaagccgcggtagctatgctggcctgtgcgcgtatcggtgccgttcactcggtaattttcggcgggttctcaccggatgcggttgctggtcgtattattgattccaactccaaactggttatcaccgctgacgaaggtatccgcgctggccgcgctattccattgaaaaagaacgttgatgaagcgctaaaaaatccggctatcaccagtatcaataatgtcgtggtcttccaacgtaccggcaaaccgggctactggcaggaaggtcgagatttatggtggcatgacctgattgaaggcgtttcagcggattgtcccgctgaagagatgaatgcagaggatccattattcatcctttatacctctggttctactggtaagcctaaaggcgtactgcacaccaccggtggctatctggtttatgccgccatgaccttcaaatacgtgtttgactatcacccgggcgatatctattggtgtaccgccgatgtgggctgggtcaccggtcacagctatctgctttacggcccgctggcctgcggcgctatcactttgatgtttgaaggcgttcctaattatccaggcgttaaccgcttaggtcaggttatcgataagcatcaggtcaatattttgtacaccgctccaacggcgattcgcgcattgatggccgaaggcgataaagcgattgaaggcaccaagcgcacatcgctgcgtctgatgggttcagttggtgagccaattaaccccgaagcctgggaatggtattacaacaaaattggtaacggtaaatgcccaattgtggatacctggtggcagaccgaaaccggcggtttcatgattacgccactgccaggtgcaaccgagctgaaagccggttcagctacccgtccattcttcggcgtacagccagcgttggtggacaatctggggaatccgcaggaaggtccagccgaaggtaatttggtgattatcgattcatggccgggtcaggcccgtactctgtttggcgatcacgatcgtttcgagcaaacctacttctcaacctttaaaggcatgtatttcagcggagatggcgcccgtcgcgatgaagacggctactactggattactggccgcgtggatgacgttctcaacgtttccggtcaccgcttaggtaccgctgaaatagaatcggcgctggtttctcatccgaaaatcgccgaagcagcggtggttggcgttccccacaatattaaaggtcaggcaatttatgcctatatcacgttgaatcacggagaggagccaacaccggaactttatagcgaagtgcgtaattgggtacgcaaagagattggtccaatcgcgacgccagatattctgcactggacagattcattgccaaaaacccgctctgggaaaattatgcgtcgcatattacgcaaaattgccgcgggcgataccagcaatctaggggatacctcaacgctggccgatccgagcgtagtagaaaaattactggaagaaaaacaatcaatgcaagcaacgtcataaattacaccgccagagagcggcaacttaattaatgcctcacaggagaactctgatgaatgacagcatttatcaagagattgaaaataatcctaaattcaaagagttggtacaaaagcgaggccggtttgcctggctgctatcatcaattaccttagcactctacgttggctttatttttctcattgcctttgaacctcaatggctggggactccgctatatgcaggagccagcatcacgcgcggtattccggtcggcataggtttaatcgtaatttcttttgttcttaccggtatttatgttgtccgcgctaacggtgagttcgaccgcatgacggcagaaattcttcgcgaggtgaagcaatgaagatccgccattggtctgcactttccttactggctctgcctgcgctgtcacaggcagaggcaatcagcggtgaagttcagcgtcaaccgttgaatattcaagctattgtgatgttcttactttttgttggcgctacgttgtatatcacttattgggcttcgaaacgcactcgttcccggcaagattattacaccgctggcggtcgcatcaccggtttccaaaatgggttggctattgccggtgactttatgtcagccgcatcattcctcggtatttccgcactggtttatacctcaggctacgatgggctgatctattccattggttttctgatcggctggccaattattctgttcctgattgccgaacgtctacgtaatcttggtcgctataccttcgccgacgttgcgtcataccgtttgcaacagcgcccaattcgtaccctatcagcctgcggatcgctggttgtggttgccttatacctgattgctcagatggttggtgcaggtaaacttattgagctgctctttggcctgaactaccatgtggccgtagtattagtcggtattctgatggttttatacgtgttatttggcggaatgctggcaaccacttgggtacaaattatcaaggctgtcttgctgctggcgggagcaacattcatggcgttgatggtcatgaaatccgtcggcttcaacttcaatactttgtttagcgaagccatcaaagttcaccctaacggtctcaaaatcatgagccccggaggattggtttcagatcctatatctgcgctatcgctgggtctggctctgatgtttgggacagccggactgccacatattttgatgcgcttctttaccgtaagtgatgcaaaagaagctcgtaaaagcgtgttctacgctactggctttatcggttacttctatattctgacctttattatcggtttcggcgctattttactggttggcccaaacccttcctttaaagatgcggctggcgcactgttaggcggcagcaatatggcggcggttcatcttgctaacgccgttggaggcaatttcttccttggttttatctccgccgtcgctttcgccaccatcctagcggtagttgccggcctaacattagccggcgcctctgcggtttcccatgacttatacgccagcgtaattaagaacggtaaagcgcgagaacgtgatgaattacgcgtctctaaaattaccgtggtggtattagggattgtagcaatcggcttagggattctgtttgagaatcagaatattgccttcatggtaggtctggccttctcaatcgccgccagctgtaacttcccaataatcatcatttcgatgtattgggacaagctgacgacacgaggcgcactagtcggcggctggttaggattgattactgccgtcgtgctgatgatcttgggaccaaccatttgggtcaagattcttggtcacgccgaaccaatctatccatatgaatacccagctttattctcaatgattgtagcctttgtcggcacatggctgttctctatcacggataattcagaaaccggcaagaaagagcgcctgctgttcagagcgcagttcgttcgatcgcaaaccggcctgggcgcctctcaaagcggcggccactaagcattagttttttcaaatatctcaatgtactagaataaaaaccaaggcccttcggggcctttttccatctcattcagtgcgaaaatagcgaaataaaaatcggtcgtgcagagggttagactgatacagataaaatgtagagagaatttataaacgggctgattctacccgacagtaataataaagataaaagcctaaatagccttcagcgcagctgactttttcactgttaagaacgaggtacttttggggagaattacgccacattacctaaaatgtccgcaggataactaactcttcatcaccgctttataatgttaaataaccgagtaatcagcacgatatacgaaggctattgagaataatttatggctcgtgagtggccaatcctgaccgataagtgatgagtgataagtgataagtgataagtgataagtgataagtgataagtgattatcgccggattattggttttcatgataattactttcgaccagcagttaaaaatcttctgtctgttactcttcgcagtgaggccggtagtgtatcagaggcctcagcatcccgactggcgacacgttttatccccttacgccccaccggatgcaagcctggctcttgagctaccgccgagtgtgaatacccattaatgaggatgagtttccgataaaaccgacctggttcgttggttgcatggctttttaataaaatataagcccggtgagtgactgtatctgcctgaaaatgctgcgaatttactgcctgaaaacgtcaacggcggcgcaatttaccggataagccgccccttatggaatgaaaatcgccatatacgccttcaacgcccgacattcccgggggttcccatgcccttaaacgcaaaaagccccccgcaatcgcaggaggctcggttcgagggcggcaatgacttttatccgcctcgcgtctgtcttttttccatagcaaaaaccccacgcttttggcatggggtcttggcttgatttgatgcctggcagtgtccactgtattcgtctcatcttctggatgagactcaccccgctggggccagcgcaggcgcagtttgtcgcatgcatgctcgagtcgcacaccacccaaacgagacaaacaaaaaaggccacccgttagggtagcctcttttgtttatttgatgcctggcagtgtcctactctcgcatggggagaccccacactaccatcggcgctacggcgtttcacttctgagttcggcatgggatcaggtgggaccaccgcgctattgccgccaggcaaattctgtttcaatcaacccgccacgtgatttacaccacacagccagtcaatccaatctgttaacaatgctgaaaatcaaaacgctctctaaaacaccttcggtgttgtaaggttaagcctcacggatcattagtactggttagctcaatgcatcgctgcacttacacacccagcctatcaacgtcatagtctttaacgttccttcagggggcttaaagccccagggaagactcatcttgaggcaagtttcgcgcttagatgctttcagcgcttatcttttccgcatttagctaccgggcaatgccattggcatgacaacccgaacaccagtgatgcgtccactccggtcctctcgtactaggagcagcccctctcaatcttccaacgcccacggcagatagggaccgaactgtctcacgacgttctaaacccagctcgcgtaccactttaaatggcgaacagccatacccttgggacctacttcagccccaggatgtgatgagccgacatcgaggtgccaaacaccgccgtcgatatgaactcttgggcggtatcagcctgttatccccggagtaccttttatccgttgagcgatggcccttccattcagaaccaccggatcactaagacctactttcgtacctgctcgagccgtcactctcgcagtcaagctagcttatgcctttgcactaacctcacgatgtccgaccgtgattagctaaccttcgtgctcctccgttactctttgggaggagaccgccccagtcaaactacccaccagacactgtcctcaccccagattatggggccgagttagaacatcaaacattaaagggtggtatttcaaggttggctccacgcagactggcgtccacgcttcgatgcctcccacctatcctacacatcaaggctcaatgttcagtgtcaagctatagtaaaggttcacggggtctttccgtcttgccgcgggtacactgcatcttcacagcgagttcaatttcactgagtctcgggtggagacagcctggccatcattacgccattcgtgcaggtcggaacttacccgacaaggaatttcgctaccttaggaccgttatagttacggccgccgtttactggggcttcgatcaagagcttcgccttgcggctgaccccatcaattaaccttccagcaccgggcaggcgtcacaccgtatacgtccactttcgtgtttgcacagtgctgtgtttttattaaacagttgcagccagctggtatctgcgactggcttcagctccgagagcaagtctcttcacctagcgccagcgtgccttctcccgaagttacggcaccattttgcctagttccttcacccgagttctctcaagcgcctgagtattctctacctgaccacctgtgtcggtttggggtacgatttaatgttacctgatgcttagaggcttttcctggaagcttggcatcaactacttctgcaccgtagtgcatcgtcatcacgcctcagggttgatggttttccggatttaccaggaatacccccctacacgcttaaaccgggacaaccgtcgcccggctagcctagccttctccgtccccccttcgcagtaacaccaagtacaggaatattaacctgtttcccatcgactacgcttttcagcctcgccttaggggtcgactcaccctgccccgattaacgttggacaggaacccttggtcttccggcgtgcgggtttttcacccgcattatcgttacttatgtcagcattcgcacttctgatacctccagcagtcctcacagactaccttcaacggcttacagaacgctcccctacccaacaacacctaagtgtcgctgccgcagcttcggtgcatggtttagccccgttacatcttccgcgcaggccgactcgaccagtgagctattacgctttctttaaatgatggctgcttctaagccaacatcctggctgtctatgccttcccacatcgtttcccacttaaccatgactttgggacyttagctggcggtctgggttgtttccctcttcacgacggacgttagcacccgccgtgtgtctcccgtgataacattcttcggtattcggagtttgcatcggtttggtaatccgggatggacccctagccgaaacagtgctctacccccgaagatgagttcacgaggcgctacctaaatagctttcggggagaaccagctatctcccggtttgattggcctttcacccccagccacaagtcatccgctaatttttcaacattagtcggttcggtcctccagttagtgttacccaaccttcaacctgcccatggctagatcaccgggtttcgggtctataccttgcaactagacgcccagttaagactcggtttccctacggctcccctatacggttaaccttgctacaaaatataagtcgctgacccattatacaaaaggtacgcagtcacaccacgaaggtgctcccactgcttgtacgtacacggtttcaggttctatttcactcccctcgccggggttcttttcgcctttccctcacggtactggttcactatcggtcagtcaggagtatttagccttggaggatggtccccccatattcagacaggatgtcacgtgtcccgccctactcatcgagttcacagcatgtgcatttttgtgtacgggactatcaccctgtaccgtgcgactttccagacgcttccactaacacacaaactgattcagactctgggctcctccccgttcgctcgccgctactaggggaatctcggttgatttcttttcctcggggtacttagatgtttcagttcccccggttcgcctcgttagactatgtattcatctaacgatagtgcaacgaattgcactgggtttccccattcgggtatcgtcggttgtaacgcttcatatcagcttaccgacgcttttcgcagattagcacgcccttcatcgcctctgactgcctaggcatccaccgtgtacgcttagtcgcttaacctcacaacccgaaggtgtctttcgacatcatcgtgctgcgattattgagagactctacctgcagatgactccttgtctcggtaaatctacggagagacaagttttagctgcagtgtttcaattttcagcttgttccagattgttaaagagcaatatcttaaacacgactcgttaaagtcatctttaagatattcagttgataatgtctttcactcattatcggatggcgtccccaaggggattcgaacccctgttaccgccgtgaaagggcggtgtcctaggcctctagacgatggggacacaggaaattccgactaaatcaaaaacttaatcgtttctcgtgtcatcatgagtcgaaactcacgacatcaacaggtgctcttgctcattactattatcagacaatctgtgtggacactacgcaatgcgtatcattaggtaaggaggtgatccaaccgcaggttcccctacggttaccttgttacgacttcaccccagtcatgaatcacaaagtggtaagcgccctcccgaaggttaagctacctacttcttttgcaacccactcccatggtgtgacgggcggtgtgtacaaggcccgggaacgtattcaccgtagcattctgatctacgattactagcgattccgacttcatggagtcgagttgcagactccaatccggactacgacagactttatgtggtccgcttgctctcgcgagttcgcttcactttgtatctgccattgtagcacgtgtgtagccctactcgtaagggccatgatgacttgacgtcatccccaccttcctccggtttatcaccggcagtctcccttgagttcccaccatgacgtgctggcaacaaaggataagggttgcgctcgttgcgggacttaacccaacatttcacaacacgagctgacgacagccatgcagcacctgtctcacagttcccgaaggcaccgaagcatctctgctacgttctgtggatgtcaagagtaggtaaggttcttcgcgttgcatcgaattaaaccacatgctccaccgcttgtgcgggcccccgtcaattcatttgagttttaaccttgcggccgtactccccaggcggtcgacttaacgcgttagctccggaagccacgcctcaagggcacaacctccaagtcgacatcgtttacagcgtggactaccagggtatctaatcctgtttgctccccacgctttcgcacctgagcgtcagtctttgtccagggggccgccttcgccaccggtattcctccagatctctacgcatttcaccgctacacctggaattctacccccctctacaagactctagcttgccagtttcaaatgcagttcccaagttaagctcggggatttcacatctgacttaacaaaccgcctgcgtgcgctttacgcccagtaattccgattaacgcttgcaccctccgtattaccgcggctgctggcacggagttagccggtgcttcttctgcgagtaacgtcaatcacttcacgtattaggtgaaatgccttcctcctcgctgaaagtgctttacaacccgaaggccttcttcacacacgcggcatggctgcatcaggcttgcgcccattgtgcaatattccccactgctgcctcccgtaggagtctggaccgtgtctcagttccagtgtggctggtcatcctctcagaccagctagggatcgtcgcctaggtgagccattaccccacctactagctaatcccatctgggcacatccgatggcgtgaggccctaaggtcccccactttgctcttgcgaggttatgcggtattagctaccgtttccagtagttatccccctccatcaggcagtttcccagacattactcacccgtccgccgctcgccggcaaagtagcaagctactttccgctgccgctcgacttgcatgtgttaggcctgccgccagcgttcaatctgagccatgatcaaactcttcaatttaagatttgtttgatttgctaccgaagtagcgatgctcaaagattactttctgcaaatatgcattcgaaccgaagttcaaatgtttactgctttggtcactcttcaagacttgatatttcttctgcctgccgaaacaggctttgatatcgtcttgcgagtgcccacacagattgtctgataaattgttaaagagcgttcgttacccgttcgcttgtggcgaatcttacggtaacgcgggaggcagataatacgctttcccgctacagagtcaacaacttaattcgttaattttctctgttctccccggccactctgtgaagttgctcacagcgccgtgtcgatggatgcgcattatagggagctgcttcagaatggcaagggtttatcgtaaagtttattccgtttgctgattatttgcgctttacgcttatttaacccgcattttgatggcttttggtagttctgcgaggctatttagcacccaatcggccagcgcttcacccgcttcagttacgggtttaccgcttctcaccagaactttagtaccgacattggcagccaatgcggcctgcatgtcttcaattttatcacctaccatataagaagcagccatatcgatgttcaattcttgctgtgcttctattaacatgccaggtaacggcttgcgacattcgcaggtttgacgaaactcgtcgacacttccttccggatgatgcggacagaaatagataccatccaaatccacaccgcgatcggccagtgaccaatccatccattctgtcaggctgacaaactgggcttcggtaaacatgccgcgggcgatgccagattggttagtcactagcaccaaggcaaagcccatttcttttaattcacggcaagcatcaatcacaccgtcaataaactgaaagttatctatctcgtggacataaccgtggtcgatattaagagtaccgtcacgatctaaaaatattgcgggaactggctgcgtcacttatatgctcctgaggactgtaaacaccgctagtattgcatgtttcacccatcattgagaatgaagagaaataaccttcccagttgacttggacgtctagacgccttaacatccgatccatgctttggtttcactaaagtttactttttatctagccacggaaactaacgataaaataagaataatatgattaaactctccaatatcagcaaagtgtttcagcagggatcgcgtgttattaccgccctctctgacgtgactcttcacgtccctgccggacagatctatggcgttatcggctcatcaggcgcaggcaaaagcaccctgattcgctgcgccaatatgttagagcgaccaaccagcggtcaggttctggttgatggtcaggatctgacttcattatcagaacgcgaactgactcgcgcacgccgtcagattggcatgattttccagcattttaatttgctctcctcccgtaccgtattcggtaatattgctctgccgcttgagttggataacacgccgcgcgcagatataaagaagagagtgctcgaattacttgatttggtcggtttggctgataaacaggacgcctatccggctaacctttccggcggacaaaaacagcgcgtggctattgcccgagcgcttgccagcaatccgaaagttttattgtgcgacgaagccaccagcgcactggacccagcgacgacccgttctattctggaactgctgaaagacattaaccgtcggctgggattaactatcttgttaatcacccatgaaatggacgtggtaaaacgcatttgcgatcaggttgccgttattagcgaaggcaagctgattgagaaagacagcgtgagcgaagtgttctcccatccgaaaacgccgctggcgcagcagtttattcattccacgctgcatctggatatcccagaagactatgccctacgcatgagcgctgaacctgcgtctgaccgtgtgccattgctgaaactggaatttaccggcaaatccgtagacgctccgctgatttctcaggcagtacgtcgctttaacatcgatatcggtattctgagttcacaaatggattatgccggcggagttaaattcggcgttatgttggcggaattgcacggcgaaagtgaagatggcctggccgcaatcaaattcctgcaagatcatcatgtaaaagtagaggttctgggttatgtctgaggcaatgatgtggttaatgggccggggcatctgggaaacgattgtgatgaccttcgtttccggctttttcggttttgtactgggcctgccaattggcgtgttgctgtatatcacacgtcctgggcaaatcagcgccaacagtaccttatataagacagtctcagcgttggtgaatattttccgctccatacctttcattattttattggtttggatgattccattcactcgcatgatagtaggcacctctatcggcctacaggcggcaatcgttcctttaaccgtaggcgctgcgccatttatcgcgcgtatggtagaaaacgccctactggagattccatctggtttggtagaagcggctcgcgccatgggtgccacgccgttccaaatcatcaaaaaagtattattaccagaagctttgcccggtttagttaacgcggcaaccattacgctgattactctggtcggttattccgccatgggtggcgcagtcggtgccggtggtttaggtcaaatcggataccaatatggttatattgggtatgacgcgaccgcaatgaataccgtcttagtattattggttattttggtctatctgattcagttctgtggtgaccggatcgtcagagccgtgactcacaagtaataatcagcctgcgatagcgctcacagcggcgcctattaaaatgaatgtctatagaggaaaggatatgtcttttaaattaaaatctatcgcggcagtcggcgcgctgatcggaaccctgcttttggccggttgtggtcaggaagaaaaagatactaatcacatcaaagtaggtgtgatcgttggcgctgagcagcaggttgcagaagttgcgcagaaagttgcgaaagataaatacggtctggacgttgagttagttgtattcaacgattatgtgttgcctaacgaagcgttgagcaaaggcgatatcgatctgaatgcttttcagcataaaccttatctggatcagcaaatcattgatcgcggttataaattggtttccgttggtaattccttcgtttaccccattgccggttactccaagaaaatcaaatcactggacgaactgcaaccgggctccagcgtcgcagtacctaacgatccaactaacctaggccgttccctgctgctgctggaaaaacaaaatctgatcaaactgaagccaggcgtaggcttgctgccaacgaagctggatatcatcgaaaaccctaaaaacctgaatctggttgagctggaagcgccccagttaccgcgcgttctggatgaccagaaaattgcgctggcggtgatcaacaccacttatgccagccaggttggtctgactccggcgaaagacggtctgtttgtcgaaggcaaagactcaccttacgttaacctgatcgtggcgcgtgaagacaataaagacgcggaaaacgtgaagaaattcgtacaggcctaccagtctgaagaagtttacgaagccgcgaataaagcctttaacggcggtgctgtaaaaggctggtaatttttcattactgattttagtgaatatatcttcaagacgggctacggcccgtcttgttatttgcatgatagattgcttcaatagcgcaacttaaatataaaaagcaaaggaatctctatgcgtgcgttacctctctgttggttagctctttcgctaactggatgttccatgctgcaaaccgaatcatccaatggcgggaagatgttgccaaacccacagccgacggccaaatccactcaaactacggctccgcgttctgcgccggtgaaactgtataaaaccgccgaagagttggtcggtaaacctttccgtgatttaggggaagtttcaggtgaatcctgccaaaccagcgcgcaagactcaccgccgaatattgccacggcgcgtaagagaatgcagattaaagcctcttacctgaaagcaaacgcggtattgctccatgaatgtcagattatcagcggcgcgccaggttgttaccagcaggcgatttgccaaggttctgcgttgaacgtatcgtcaaaatgaccacgttttcctttgagcagatcggcgttatccggtcgccctataaagaaaaatttgcagttcctcgacagccggggctgattgaagacggcggcggtgagctacaattactggctccttataatcagccagaggcagttcgcggcctgaatgattttagccacctatggataatgtttgttttccatcaaaccatggacggcggttggcgacctactgtgcgtcctccacgccttggcggcaatgctcgtatgggcgtatttgccacccgatcgacttttcgtcccaatcccatcggtatgtcgctcattgagctgaaagccgtgcgagtgaaaggttcggaagtggtgcttgagctagggagtctggatctggtcgacggcacgccggttatcgatattaaaccctacctgccctttgcagaaagccagccgctggctcgtgccggttttgctcaatcagcacctgacaccgatatgccagtaacattttccgcttatgcccaacggcagttagcagaaaatcaggcgcgctacccgaatctagagcgttttatttctcaggttctggcacaggaccctcgtccggcctatcggaaaaatgaagtagaaacgcgggaatacgcagtattattattagagtttaacgttcgttggcgagttattgggcagcaaaccgaagtgttatccctcgacccacgctaaatttcgtgctgttctcttttgacaaccgtttctcactggtaaactaagctacttttactgtttttgactgcctgaccaatctcggcagcctgttgcaatttgcagttctaatggaaccaaaacatcatgcgcactagccaatatttgctctccactctaaaagagacgcctgccgacgcggaagtcattagccatcaattgatgctgcgtgccggcatggttcgtaaactggcctcaggtctttatacctggctgcccaccggtattcgcgttctgaaaaaagttgaaaacatcgttcgtgaagagatgaacaatgcgggcgctattgaagtttccatgccggtagttcagcccgcagacctgtggcaggagagcggtcgttgggagcaatacggccctgaattgctgcgttttgtcgatcgcggcgaacgtccttttgtacttggcccgactcacgaagaagtgattaccgatctggttcgtggcgaaatcaactcttataagcagttgccgctgaacttcttccagattcaaaccaagttccgggacgaagtacgtccgcgctttggcgttatgcgcgcccgcgagtttctcatgaaagatgcttactctttccatacaacgcaggagtctctgcaagaaacttacgatgccatgtatgccgcatacaaccgtatctttgaacgtatggggctgaacttccgcccggttctggctgataccggctctatcggtggcgacgcatcccatgagttccaggttctggccgacagcggtgaagacgatatcgttttctctaccgaatcagactacgcggcgaatatcgaattcgcggaagccatggcgccaaacgaacctcgcgcggccgcgtcggaagaattgcgtgttattgatacgccaaatgcgaaaaccatcgctgaattggtagaccaattccagttacccatcgaaaaaaccgtcaaaaccctgatggttcatgcccatgaagaaagtggccataagctgattgccctgctagtacgtggcgatcacgagctgaacgaaatcaaggcggagaaactaccgcaggttgccaaaccgctgaccttcgcgagcgaagaagaaattcgcgctatcgtaggcgcaggtcctggttctctcggcccggtgaacctgccaatgccagtggttatcgatcgcagcgttgcagttatgagcgatttcggcgctggcgcaaacattgatggcaaacattacttcggtattaactgggagcgcgatctgccgctgccgcagattgctgatctgcgtaacgtggttgaaggcgatatcagcccagacggcaaaggtactttgcagattaaacgcggtatcgaagtgggtcatatcttccagctgggcaccaagtattccgaagcaatgaaagcgacggttcagggtgaagatggccgcaatcaggtcatgaccatgggctgttacggcattggggtttcccgcgtagtggcggcggcgattgagcaaaatcatgatgaccgcgggattatctggccagatgctattgcgccattccaggttgctattctccctatgaatatgcacaagtctttccgcgttaaagagctggcggaagaactgtacgccactctgcgcgctaaaggcatcgatgtcattctggacgaccgtaaagaacgtccgggcgtgatgtttgccgatatggaactgattggcgtgccgcacaatatcgttattggcgatcgcaacttggacagcgaagaagtggaatacaaaaaccgccgtgccagtgagaagaaaatgattaaaaccagcgaaatcattgagttcctgctgagtgaaatcaaaggctaatcagccgagaatggataccaaaaagccctgtttttaacagggctttttctttagctgaatcactgaaaaaccagtgaataatccgtccgcttacgattatttgctattacaggtcttacccgcagtgaacttgatattgccatcaggaatcatggacttatcccactgtccgtcttccatagacggtcgcataccaaaatgtccatttaacgtcaggaaaatcggctcgccggcgtttttccgcgcattcatataaccggtttccaactcgacattattatcaaccgcgaagctatggccggtagcgcagtcggtaaactgtgccgcatcagccatataaatatacatgccacgcaaaggaatagacgtcgttggcaaagcttcgctggccgttaactggtagttcagagaggatgtaatccgttgtccattttgatccaacatttccagattctttcctaccggatggaaatagcgcttctcacctttagcgctggttaacactagcttatcggcggttcgcgcccaggttccctgctctgagaatgtcctatcgccatctctggtatcgcgataagtttcctgcaatacgaaggtgccgtcagcatctaaaaataaagacgtatccagcccactgcaatccgcgcaaggcaatacgccctgataactttgcagcatcggttgtaaaggttgctgttttggctgataaaggtttttacagcccagcagtgacaaagcgccagctgctaataacaaagtaatactgagttttctcacagcttatctcctactgcgtaccaatcctatggacccacacccctgcggtatcaatcctgatgtattttgccgcgcagcgctttagttgcacctttgcggacttttccttccacccgccgaattttagagcctttggtcggcttggttggtcgccgggtcttctctacgaccatggcttggcgaatcagcgccgctaaacgggccagagctgcctcgcgattcatatcctgactgcggtattcctgagccttgataatcaccaccccatccgccgtgaccagatgatgattcagcgccaacaggcgctgcttgtaatactctggcaggctagaggccttgatgtcaaagcgcaaatgtattgccgttgaggatttattaacatgctggccacccgcgccctgagcccggatcgccgttagctctatctcgctgtcggccagcgtcacgctattcgaaatatttaacacacttattgctcgctgccttgccattcagaaaaagtgatttccagattattctgagcatcagaaagccaaatggttccctcttgcagggtcgcctgcaaattcatgttgcgagcggacatcgcagccagtttcgccatttgctcatcatccagaaaacgtacctgaagattttcatggccggaaagtttctctttaacctgcggccaccacactttcgccgcgcgttccccataggaataaagaacaacttttttcgactgattgcaggctttgcgcaagcgcttctcgtccggcagccctaactccacccacagctcgatgccgttatgatcgttacgcagccagatttccggctcatcgtccgcacttaggcctttggtaaataacaaacgctcgtccgcatggcaaatccacgccaatagccgcagcatcatgcgttgatcggtttcggaagggtgctgtgccaccgtcaggttagtatccataaagacattgcgatccatatcggcaatattgactgtggctttgtgaatggttgcttttagtgccatgggtgacctcttgattttcaggaggacagtgtacttgatcccgcctttgcgcgcgctgctaaccccacataaaccgattattaatggcttttagtaagcaaagaaaccttccgctgaacgctgatatctcttcaactcctgtgctatagtccttataagttcagagtttatcttcgtggttttacaatgtggtttaccattgaaaatccaccgggttaaacttttccgggaggataccgtgcaacaatactgtgaattagtacgtcgtttttattccgagattggcagtggcgatcttgggtatgtgcctgatgcgctgggctgtgtattgaaagcattggacgaagttgcggcaaatgacgcactgccgtcctccgttagggaacaggcggcttacgccgccgctaacttattggtgagcgattatgtcgatgagtgaagagtatcaacccatcaattgcgatgattacgataatctggaactcgcctgccagcatcacctgatactgacgttgaagttgagaggcggtgagatcgtagaaggtaaagccagcgacctgctattacgcaagcatgtcgaatacctgattgtggaagaatcggggaaaatgcgcgagttacggctggatcatatcgccagcttcagtcatccagaaattggaactgtcgtggtcagtgcttcgtaatcctttcgccaaaaaaaacgggccgctgaaaagtggcccgttttgtttttaaccaaggcgaaatattagggtttaaggctggcatagtaagccgccaaatcagacatatcctcatcggtcaaacctgaaacataggcgcgcatcacctcagcctgaccgccagaacgcccgccggttttatacgcttttagcgattgctcaagatagagcgcattttgccctgccaaattcggatacatcggcaccgaaaccttaccattcataccgtgacaggcaatacaggcggcagacttcgccttaccggcctcaatatcatttttcgccattgcagaaaaactgcataggctcaacgccactgccagacacacaactgatttcatcattgatcctcaagaccgcttttattattcgttatttattctgttattcagctgacgccactgaacgcaccagcaggctccgccttcttcggctacgccctctggcgtgataaatacgccgatggcggctatcaattgctcaccaaaatacaatagcggaatacgttcgcgctcccaaggcggaatgcctaattcctgccacaattttttagcgcgccgcgaatgccgacgcccaacgattctgatgttcccctgtaggccaaaacggacgctaacaggttcattttcagcgggcactcggattttctgtcccttctcatcagccagttccaaacgtcccagcccggcgggtagctccaacggcgatggcacagaccacggtaaaactgtcgtagtgatggcttccaactgcggtaatacatacaaatattgccgaaaacgccgtacctgatgaggagctaactccagcaccggttctgcatcagcccgcgccaacgccacttcattccaaattcgctgtagctgttctctggcgggcatcgccacgcctttctctgccagccaacgacgcagcaaggcaccgcgtttagcttccgacattagcgctaaaccgttgatcgctaaagaaccatccggttgccgtagttgcgccaagggttcagataatagctcatctaacaattgttcctgctcagcgcacaactccgcactacgcgccaccgatcgggaaaaatgcggccaacgttcggataaaaccggcaatactttcagacgcagaaaattacgatcgaagcgatcgtcctgattgctatcatcttctatccatgccaactggcaatcttcggcgtaacgctctaattgtttgcgagaaatagctaataatgggcgcaaaatctgcccctcagcaaatggcatagccgcagccatcgaagctaaacccgcagggccgctgccgcgttttaacgccagtaaaaaggtttcactttgatcgtcgagatgctgagcagtaagtaaggtttctccttctgccaagtggctggaaaaggcctgataacgcgcggttcgcgcggcggcttctatcccactgtggcgcgtatcgagctgtacccgaacaacttcaaatggcacattccagccctgacactgtgcctggcaatgttccacccagttttccgccagtggattcaaaccatgatgtatatgaatagcgcgcagggttagagacggcaacagactagcgcgcagctgcaccaaagcgtggagcaacacgctggaatctagtccaccgctgaatcccaccagaaaactggtttgcccacgcaggttatcggcaatatattcaacgagttgttgtggctgattcatcgatacatcaccgagacggcttcaattcatacagttccaacggcagcccgtccggatcctgaaagaaagtgaaacgcgattgtgtataaggatcgattcgcaccgtttcacaagccacgcccttctcagccaattgcttaacgctcaaatcaatatcatctacctgaaacgccaggtgacgtaagccacaggcttccgggcggcttggccgcgcagccggagccgggaaggaaaataactcaatgatataattatcgtttaatgccaaatcggctttccaggaatcacgctctgcgcgataaacctcactcagcaaagcgaatcccaatacgtcgcagtagaaatccttgctgacctgataatctgagccgatcaccgcaatatggtgaatctggcgaatgtccaacatggctggctccatcattatttttcacccgctggctaacgggtgatgggttatcaactggttttcagcaccttaaccatatatcgtccatcgtcggccagatgagcgccgtgaatatcggtttcaaagccgggatagtgctcgccgatagcacacagcatcagcaggaaatccaacaccgctcggctttcttcggtaatcatttcacccggcatcaccacgggtacgcccggcggataaggcagaatcatattggcaaccactttgccaatcagatcacccatttcacattcttctatattaccgcggatttgctgttggaacatatcgtaaggcgtcagtttcatttccggcaatacgctaaaggactgatgcattagacgcggcaagtcatggtgacgaataagttgatgtatgccggcggcgagatcctgaattcgcatatgacgataaaaatcaggatcttccgcatacaaatccggcagcatatttttgacacgtaaattcagatcataggcgcgcttaaactccatcagcccacgtaataaactcatggctttggttttatctataccaatactgaacaggaacaataagttatacggcccggttttctcaactataacgccacgctcatcgagaaattttgccactagagcggcaggaataccttcctccgtcaactgcccatcactgttcattcccggcatcagaatcgtgactttaatcgggtccagatacatatgatcagcgtctgccttagcaaagccatgccagttttcgcccggctctagcggccagcactggatgtcttcaatatcatctggctgccagacgtcaaagaaccagttatcgctttcggctctcaagcgcttaacttctttacggaaatgcatcgcgcgctcaatagagcgctgaatcagccgtttgcccggtttacctcgcatcatggcggctgccgtttccattgaggccacgataccgtaatgtggggaagtggtcgtgtgcatcatataggcttcattaaaggtcgattcgttataatcgccttttatatgaatcatcgaagcctgagaaaatgcggccagtaatttatgcgtcgattgggtttcgtaaataactttaccgggaatcctatcgccgctcattccactcttaccatcgtagatctggtgaaattgagtgtaaggcacccaagcagaatcaaaatgtatcgaaggaacgtccagagtctgtttaatataatcggtgttatacaacagaccgtcataggttgagttagtaataaccgcatggacaggccaggtagcccccgccgtttgcgcgatcttttcgttgatgctttcgcgagtaaactctctcttcggtattccgcccaaaataccgtaggcattacgcgcaggccgcaaatatagcggcgtgatatcgctcatcatcaataaatgcgtcagtgacttatgacaattacggtcgatcaatatgctgcaaccggctggggcagaatacatgccgacgattttattggcggtcgacgtaccgttggtcaccatataacttttttcggcgttgaaagtacgcgcgatatactcttcggcttctaaatgcgggccgctatgatccagtaaagaccccagttcggtcaccgaaatagaaatatcggcttttaaggtattggcgccaaagaaatcataaaataggctccccaccgggcttttctgaaatgccgtgcccgccatgtgccctggggtgcaaaacgtatattttccctctttaacatagtgaaacaacgctttggtcagcggcggcgtgatgacatcaatatactcggcggtatactgctcaatatgctgagcaatatcatcggctgcgttaagcgcatattcgaagaaatacagtgccatgcgcatttcattcaggctgacatccagcgatgaggtcgtattgataaaagcataaatcggcaggtattcatttaactcgttgatctcggtacacagcgccatgctgtgctgatcccaatcgaaaatgacgccaataatccgagcgttatgttcaatcagcttgagtagatcctgcccatctttcgggtaaaccagttgaaaacctttagcttgcagagcgctgtgaagctcacgaattggctcatccttatagtaaccccccattgggctcataatggcgatgatattcatttgtatagtcctcacatttttatttatccctataacaacatgaaaactcgccgctgtgtacctaattagataataatgttggaaattctatatcagacaccatgccatatattgactgcattctggacaaaataataaatttaatcaccgagtgaattaatcgggcgagattaaagccacaattaaaactaaaaaagagaacgatcagacaataataattatcaaaacaagcccagccagcaaattaaataacatcaagtaataatcaaaatgtaacttattttaaggcttttaaatttttgatttacatttaacacttcaccatcaaaatataatattttatttcacaggttataaggatggtgttatgcagggaaagtttctctctctattaatcaatacactgtttattattggacttctatttttttatatatccgccagctatgctatttaccccgttaacctggtataccgcgccgacacccgggacttaggggagataaatgcagctaacggaatgcgtccttgggcaggcccacgcgttgattatgatcttatacatcattttgatggagaatctgtcgatgattacaccagtgcctttgtctctaccagcgcttcgtttcgtcatagcatcgagcacgcagcatcacttgccagagccaatagcgaagagccttttgaggaagactttcgaatttttatctatgccataaggccagagtcaaacttctatgaagtcgaaggttctatcgcacatgccagagataccagcgccgaacactcaccacgacaagccggattatcagcgctattgcataattatggcggaatggaggaatgggtggcgctggaaggtatatcggcggagcggatcatttcttttatcgaaataaccggagaaatattgcagaattattatcaatccggtcagctattttcaaatggcttttggataaatcgatggcagccaaatttaggttataactcagccaacgatggtgatatcagtagctcagaattttatacccatattggcaatccgcgaggttatcgtgatgtaatacaaggtgaaacactgcccccattagccgcctcttttacttgtataactcccaactccaattccatgaagaaaaggcagttacaaaataaaagatgtaaaaccagaaaaggcagacatttttatttcgtcaacagacttattgcggcattagagaataacgttgaataaataaacatatctcaatgagatattaacccaccataatataaatgatacacggaggttattttgaataaaccgattattttttctctgtttgtttcattaacgcctattgcctttgccgatgatactcctggctccagttatgtcatcgatgggaccgtcgcggccattcgcgtatcggatcaggggtgtcggatttcatttagtgagagaaccgaaccacgcgaaaatatggtctggcattttagtgacgtaccgataatctgtaatctggctaaaacggcttatgtactgcgggaaaaggtcagagtaaacgtggagataaacccggataaaagttacgttaacactatttctagtattattcttggcgataccaactcaaagtggttacccaataatctctgattgagcggctattattgcccaataaaaaacccggagtcaaagtgagtccgggtttttgtctgaaagattaaatcagcaatagccgtagttcatcaaccgctggtagcggcgattcagcaactcatcgttattcaacacatccagatcgctcagatcggccagcaattgcgctttcagtgaagcggcaatggcctgataatcgcgatgtgcaccgcctaaaggttcaggaatcacggaatcgatcatcttgagctctttcaggcgtggcgcggtaatacccatagcttcggcagctaacggcgctttatccgcacttttccacagaattgacgcacagccttccggcgaaatcaccgagtaagtgctgtactgcaacatattcactttgtcgcctacgccaatcgccaacgcgccaccggagccgccttcaccgataacggtacagacgataggcacattcagacgagacatttcgcgcaggttacgggcaatggcctctgactggccgcgttcttcggcgccaacgccagggtaagcccccggagtatcaatgaaagtaatgatcggcagcttgaagcgctcagccatttccatcaaacgcagcgctttacggtagccttctggagcaggcataccgaagttgcgacgaattttttctttggtttcacggcctttctgatgaccaatgatcatcaccggacggccttccaaacgggcaattccgccgacgatagctttatcatcagcataggcacggtcacctgccagctcttcgaaatccgtaaaaatgttagcgatataatccagggtataaggacgtcgcggatggcgcgctaattgagcgacctgccaagccccgaggtccgaaaaaatcttccgcgtcagctcaacgcttttctcacgcagacgctggacctcttcatccagattaatatctaatttttcgtcttgacggctgactgcagtcagcgagtcaattttcgcttccagctctgcaatcggctgttcaaaatcaagaaaattcagactcatagcattcctattttagtcaaattccagttccacctgctcattaccaaccagcgtccgcaggtcgatcaataaacggtctgtcggggtaacacgccacgtggcaccaaatcgtagtctggcgcgcgcatcttcccgttggtaataaagatgtactgggatcgtccccgatcggtggggttccaacgattggcggagacggttcaaaagctggtcatcaatttgcctgtcagtcagcgagatagcaagcccacgggcatatttttcacgagcttcactgatatccattaactcacgggcggtcattttaagtccaccgctaaagtcatcaaagctgacctgcccactggctatcaggatacggtctttttctaacaaatgctgatatttttccaacgcatccgtgaacatcatcacttccagacgcccggaacggtcatctagcgtacagatgccgatacgatttccgcgttttgttaccatcacgcgcgcagcgattaccagccccactgctgtcgtcattttgccccgatccgtcgggtgcatatctttcaggcgcaacccaccggtataacgctcgatttcctttagatactgggtaatcgggtgaccggttaaatacagccccagcgtctccctctcaccgtcaagaaccacctgttcctgccagcgcggtacgttagcataagattgctcgacctgctcaggcgcatccgccagtacgccgaacatatctgcctgaccaatagcttccgctttggcatgctgatctgccgctttcagcgcttctccgagagagctcatcaaggccgcacgatgcggaccgagacgatcgaaagcgccggacattatcagtttttccagaatccgtcgattcagttttttggtatcaacccgcgcacataaatcgaacagatctttaaagtagccgccttggttgcgggcttccagcatagcttcgattgggccttcgcccacgcctttgatagcgccaatgccgtaaacgatctcgccttcatcgttcacatggaaatgatacagcccgctgtttatatccggcggcaggattttcagccccatgcgccagcactcatccaccaaaccaacgactttctctgtattatccatatcagcggtcattaccgcagccataaattcagccggataatgtgctttcagccacaaagtctgataggaaaccaacgcgtaggcggcagagtgagatttgttaaaaccgtaacccgcaaatttttctaccagatcgaagatcttaatcgccagttcgccgtcaataccctgacttttagctccatcttcaaacacggaacgctgcttggccatttccgccggatttttcttacccattgcgcggcgtagcatatccgccccgccgagggagtagcccgacagcacctgagcgatctgcataacctgttcttggtacaaaataatgccgtaggtaggctctagtaccggtttcagagattcatgctgccattggatatctggataggacaactcttcgcgaccgtgcttacggtcaataaagttatctaccatgcctgattgcaacggtcctgggcggaacagcgccaccaaggcgatcatatcttcgaagcagtcgggtttcaggcgtttaatcagatccttcatcccgcgggattcgagctggaataccgccgtcgtttccgaccgttgcagcatatcaaagctctttttatcctccagcggaatggacgcgatatcgatgggttccagcccggtcttggcgcgacgggcgttgatcatctccagcgcccagttaatgatggttagagtacgcaaaccgaggaagtcaaacttcactaaaccggcatattcgacatcatttttatcgaactgagtaaccgggttattcccctcggcgtcgcaatatagcggcgcaaaatcggtaattttggtcggcgcgataactaccccaccggcgtgtttaccggcgttacgggtaacaccttccaatttacgcgccatatcgatcaaggctcgaacttcttcgtccgcttcgtaaatttcaggtaactgtggctcggcggcgaaggctttttccagcgtcatccccggatcgggcggaatcaatttggaaatacgatcgacaaaaccatagggatggcccagcacccggccaacgtcgcggattaccgctttagcggccatcgtaccgaaggtaataatctgcgaaaccgcgtcacggccatacatttcagcaacgtgctcaatcaccagatcgcgtttttccatacagaaatcgacgtcgaaatcgggcatggatacacgttcagggttcaggaatcgttcaaaaagcagatcaaattccagcggatccagatcggtgattttcagggcataagccaccagagaacctgcacctgaaccacgccccggcccaaccggtacgccgttatctttcgaccactggataaactccatcacgatcaggaagtagcctgggaatcccatctggttgataactttaagctcgatatccagacgttcatcatattcaggccgcttttgcgccctgacttccggatccgggaataaaaattccagacgttcttccagaccctgtttggatttttcgatcagaaaatcttcggtactcatatccccggtcgggaattgaggcaggaaatattcacccagccgaattgtcacgttacaacgtttggcaatttcaacgctgttgatcagcgcttcaggaatatccgcgaacagctcgcacatctgctcttcatcgcgcataaactgctgaggactataattttttggtcgtttcggatcgaccaaagtgaagccatcatgaatcgccacgcgaatttcatgggcatcaaaatccgtttcatcaataaagcgcacatcgttggtggcaaccacgggaataccgcgttcagtcgctaatgctaccgctacgtgcagataattttcttcgtcctgtcgtccagtacggattagctctaaatagtagctaccagggaagtattcattgtaaaaatcaagacattgatcgacctgagcctgattgccacgcagcaaaaatttgcctacgtcgcccatacgtccgccggacaacaaaatcagcccttcgcggtgcttaatcagccagtcacgatcgataaccggccctgcggggccatagccacgctgataagcctcggaaataagcagggtaaggttttgatagccttcgttgttacgcgccagaatagtcagatgcgcaaactcatcgcccagcatctcgctctgcacacagaaatcagcgccaatgataggtttgattcccgcgccgtgagcgctgccgtaaaacttcaccaaaccgcacaggttggtaaagtcagtaatcgctaacgctggcatgcctaaggcggcagcccgcttcaccaagggtccaatcttggctaatccatcgatcatggaataatcgctgtgaacacgcaggtggacaaaacgaggttcggccatatccagataccagaaattagtggattgaatcacacccgcaggactgggtgtctcggggcatcataactataacctgtatcacgcaaaccattgtatggatgcaattcgatattcactggctatacgttgtttccatcaggcagtagcaatgcgggcctatgccagcccgagcacgcgtttaaccggagcaaaactgcgacgatggtgatctgtggcacccaatgcggccaaccgctctagatggaatgcggtcggatagcctttatgctgagcaaagccgtaatccggaaactcggcatccagcaacgccatttcccgatcgcgggtcacttttgcgacgatagacgcagcgctaatctcagccactcggctatcccctttcaccaccgcgagggacggcatcggcagtgccggacaacggttaccgtcgattaagacataatcaggcgcaatatgcagcccggcaaccgctctctgcatcgccagcatggtagcgtgcaatatattcatatcgtcaatttcttccggctctgcgcgccccagactccaagacagcgccttctcggtaatctcgtcataaagcgccaatctgcgcttttcactgagtttctttgagtctgccagcccgataatgggttgattcgggtcgaggatcactgcggcggtcacgaccgcgccaaccagcggcccgcgcccgacctcatcaacgccggcaatgagatttgcctgcggataaataaaaatatcgctcattgcttcgctaattccaataccgcctgtgcggcctgtttgtccgcatcgcagcgaatgctttggtgcaaggccagaaaacgtgtttttagtgcttcaaccgcctcgccacccttcaataaaggtaataaagcgtctgccaatttttgcggctgacactcttgctgtagcaattcgggaaccagttcttcgcccgccagtaagttaggtaatgagacataaggcgttttcaccaaacgctccgccaaccagaaggtgaaaggcttcatacggtaacccacaaccatcggcgatttggccaacatgcattccagcgcggcggtgcccgaagccaacagagtggcatcgctggcgaccattgcagctctggctttaccatccaataaatggacggataattccggtgcaacttcggcttttatacgttcgaactgttcccgacgcttgctgttcaccagcggcaccaatacttctaaatcagggaattgctgccgtaatatctcggcggtgcgtagaaagtcggcacttaacatttcgacttctgaatgccgactccccggcaataacgccagacagtggacatcagtagcgatacctaattcagcacgagccgccgcacgattggcaaccaacggcatggcatccgccatggtgtgaccaataaaacgacagggaacgttgaaacgatcgtaaaacgctttttcgaaaggcagaaaagccaaaaccatatctgtggctttaccgattttgaaaacgcgcttatgacgccaggcccaaaccgagggactgacgtaatgaatagtgcgaattccgttctgctttaagcggccttccagggtgatgttaaaatcgggagcatcgatacccacgaatacatcgggagaaagctcgctgaaacggcgcgtcaaatccttacggattttaagaagacgcggtaaccgttccagcacctccacaacccccatcacagccaactcttccatttcgtaccaggcttcacaaccctcggcttgcattaaggggccggcaacgccgacaaagcgggcattgggaacctgagctttaagcgcccggattaaccctgcacctaaaatatcgccggaggtttctccggcaactaacccaatagttaatgggcgatcggctgtcatgacaggctcttgcataagttagcggataataccgcgggtcgaacgagcgaagaaatcgctgaacggcttaaccgcaggatgctgctcggccaattcggcaatttccggcttcacttcatccaaagtacgtccgctgcgatacacaagcttgtaagcattacggatagcatgcagagattctttatcaaaaccacggcgtttcagcccttcgatattaataccgaacggtgtcgcgtggtttccttgcgctatgacaaaaggaggcacatcctgcgcaaccccggaacagccgccaaccattacatgtgcaccgatcacacagaattgatgaacagcggtcattccgccaataatggcataatcatccacttcaacgtggccacccaaagtcgcgttattggcaaagatgcagcggttgccgataatgcagtcatgagcgatatgggcattaatcatcagtaggttatcgctaccaactttcgtcaccccggtaccttgtaccgtgccacggtggatagtcacactttcacggatacggttacgatcgccaatttccacccgtgtcggttcgccggcatatttcagatcctggttagcttcaccaatggaagcaaactggtaaatctcattatcgcggccgattttagtcacgccgttcacgacaatatgggatttcagtactgtgccttcaccaatttccacctgggaaccgatatagcaaaatgggccaatgtgaacattagcaccaatcacagcaccttcttcaacgatagcactcgggtggataaaggcggttttgtcaatcacgtatcaagactccttagatgcgggtactgctgctggtgccggtttgctgcgtgcgcacatcatggtggcagtacagacaatttcaccgtcaactttagcaacaccggtaaagcgggttaaaccacgacgctctttgacgaattcaacttccataatcatctgatcgccaggcactaccgggcgtttaaagcgggcttcatcaataccagcaaagtagtaaagttcgcctggttcaagtttaccgcggcttttaaatgccaaaataccggtagcctgcgccattgcttccaaaatcagtacgccagggaaaataggcttaccggggaaatggccttggaaaaaaggctcgttgaaagagacgttcttcactgcacgtagaaatttcccttcctcaaaatccaggacgcgatctaccagcaaaaaaggaaaacggtgcggcagtagatctaaaatctcttcaatatgcagagtatgagtgtcagtagtcaaaatactcttcctgtctaaaaaattaatgctatcaacgacacggcctgctttgaccccaaaaggagatcattaggcaggccgcaaattaggaactctgtacgcttcgggcagtaagcgccaatagcttttgttattggctcagagtggtaattactctttatcgattttacgttcgacagctttcaaacgcttattcatctcatcgatattcatcaccagtgctgcggtttttcgccacgttttatttggctgcaacggaattccggaggagtataccccaggttcagtgattggacgcatcaccattcccattccggtcacaacaaccttgtcggcaatctccatgtgaccattgatcacactggcaccaccgatctggcaatatcggccaactttcaggcttcccgccatgataacgccgcccgcaactgcggtattgtcgccaatagtcacgttatgcgcaatctggcattgattatcaatgatgacaccattaccgataaccgtgttatctaacgcgccgcggtcgatagttgtacaggcaccaatctccacgcggtcaccaattattacggtgccaagctgcgggattttgatccaattgccacgatcgttagcgtaaccaaaaccatctgcaccaatgaccgtaccggattgaatcaggcaatgctgcccaatctcaacttcatgataaacggaaacattggcccacaaacggctacctgcaccgatacgtgcatttttaccgacaaaacagcccgcaccgataaccacgttatcacccagaacaacgccggactcaatcaccgcatttgcgccaattgatacctgattgcccaaggttgcttcaggggaaatcactgcgcttggggcgatgtcctgagctggctgcggagtggtatccataatctgcgccatgcgcgcataggtcagatagggatttttaacgactaaagcagcaacgttacaataaggcagatcttcctcggtcaaaaccacggcgctagcttggcaagacgcgagttgttcccggtaacggctgtttgacaaaaacgtgatttgcgcaggtttggcagaatgcattgaagcgatgccggtgatgacaatttcgccatcaccgtgcacttgtgcatccaactgctgggctaaatcagccagtcgaattgaaggcatgtgttatttaacctgtttcagcacgtcagcagtgatgtcttttgaggaatcagcgtatgccacagcattcgcgtcgataaccacatcatacccacctttacttgcaacagatttcacagcgtcctgaatacggctcaggattttgttacgctcttccatctggcgacgacggttgtcttgttcaaacgcctgcgctttttgagagaaggtttcacgctgcgccatgacgtctttttccagtttggtacgatcgctggctttcatggtagaaccgtcgcgctgcagcttctgcattttggtctgcagatcgcgctccattccttgcagctcggttgcacggcctttgaattcattctccagctgcttagccacggtttcacgcgcgggtaattgttggaaaatgctggaaacattaacaatagcaatcttgtcagcggcttgaacgctggctgaagcagccaatgctaaaccaagacctgcggcacacaaccactttttcactataaactccttaccattacccgtttgtgtcagagacaccctgaaatgcacttgacgccggatttatccgatgcggcaaaggtaatactagatcacctttgcaacagggagatcggcgtcagcgcgatctttacttatcgatcaacaattcttgctcaactactcagtagcctgttaccaggttttaccgatgttaaactggaactgctcggatttatcacccggatagtctttgaccggtttggcgtaagagaacaccaatggacccagcggtgacatccactgtaatgctacacccgcagaaacgcgaatattgcttgggtcgctgtagtcaggaatcccggcggctcccgttgccgcagtgttttcccagtgggtatcccaaacggtacctgaatcgataaagatcgaagtacgaaccgagttagaatacttttcactgataaacggcgttggcgtgatcaattcgatactcgccacagccatggcattaccgcccacagcatcggtagatttattaaccgtagcgccattattcgcatagtatgcagctttaggcccgatgttgttcgagcggaaaccacgtacagtgctggaaccaccggcatagaagttctcatagaacggcatttctttgccaccgaggccatcgccataacctaagcgcccgcgacctaacagaacccaagaacgatcctgatccaacggcaggtagccggaagtatcgaaggtcactttgtagaattcattatcggagccaggaacggttactttaccgttaaccgaagattttacaccggaagtcgggaagaaacctcggtctaggttgttataagtccaaccaaggttcagggtaaagtcatcagcggtgaagtcagcgcggtcagtatagttcggcttttggccgactgactcgagataacgccacatagcaacctgcggcaacatgtcggacagactgttgtgcacatagcccacgcctacgcgtaatgagttattttcgttgattgggaacccaagggtaccgtcaacaccgtagctgctgttggtatagccagacaggtctgcgttatccgctttaaaatcgttgtagaacacacgaccacccagactcacaccgtcaacggtgaagtaagggtcggttaacgtaaattcagcataggtctggtaatcattcttagtaccgttaatccctacgctgttacccgtgcccagccagttatcctgttgaacacccacctggaaactcacgccactttcagtaccgtagccaatgccgaagttcaggctaccggtattacgttctttaactttgtaaacaatatcaacctgatcggcagtacccggaacacgctgcgtttccacatcgacggtttcgaagtaacctaaacggttcagacgatctttaccttgttcaacctgagcgttacccagccatgcaccttccatctgacgcatttcacgacgaagaacggaatctttactggtgtcattgccttcgaagcgaacgtgacgcacatagaaacggttacccgcatccacattaatgtgcagtttcacggttttatccgcatcgttgatttcaggctgagtctgtacgcgtgggtaagcgtagccatagcgacctaacatctttttgatgtcgtcttccatgcgcgtcactttaccgccgttatacaactcgcccggctcaattttggtcagcttctcagcttcagactgatggcccgccagattcccgttgaccaccacgctgctcaacttgtactgctcgccttctgtcaggttgattgtgatgtagatgccttttttatccggcgtcaaactcacctgagtagaatcgatgttgaagcgtgcgtaaccgcgatccagatagaagctacgcaggatctcaagatcgcctgccagtttctgtttctgatatttacggtcaccaaccacgttccaccaaggcacttcatcgcgcagctggaaacgtgaaatcagttcgtctgtgctaaacgcatggttaccgacgatattgatctgctgaatcttggcagatacaccttcggtaaacaccagcttcagatcgacacggttgcgcggcaacggcgtcactacggctttcaccgaagcgctgtatttacccacgctgtaatagaagtcctccagacctttttcaatgctggagatcgttgtgcggtctagtgcctcgccaacccgaacgccagaggcttcaaggttctgtttaagcatatcctctttcaccgctttgttaccggagaaagtgatactggcgatcgttgggcgttctttgacttgaacaatcagagtattaccatcgcgcagaacgcgaacgtcctcgaagttgcctgtggcaaacaacgcacggatagtattactgatgtcatcatcactgacggtatcgcctacgcgaaccggcatattaagtaacgccgcaccgacggcgactcgctgcaggccctcgaaatgaatgtctttcactacgaacccgtctgcaccgtatacggtggcgctgccaaacagcagcgacgctatgagcaactttttcatcgccatcgttgttatgcgttcttcctaacctatcccctgccgttaaaagcgggagaaatcattgaaaagtgcaagtcccatcaacagcattagcaatatcgagccaatgcggtagctgaaatcttgaactcgctcagaaaccggcccacccttgagcttttctatcgccaggaagagcagatgtccaccatctaataccggtaacgggaacagattgataatccccaggttgacactaatcagtgccaaaaacatcaggtaataaaccaatccgaactcggctgaaacccctgcgccctgtgcaatggaaatcgggccactcaggttattcagcttaacatcaccagtaatcagtttacccaacatgttgaccgtcaaccgcatcaactgccaggttttatccccagcctgatagagtgccgtaaacggaccatattggcgaatcgttttatactcatccggaagcggtataactttcggaattacgcctgcaaagccttcggttctgtctttacccgccgattttgtatctggaatcagggttaaagacaagggagaaccacccctttcaatttcaactgccagcggcttgccaggattttcgcgtacccggctggcaaatgtctgccaaccttcaactagctgaccgtcaactttaacgatcctatcccctgcttgtaaacccgccttttgcgctgccgactctgtttgaacctcttgcagcactgattcaatctgcgggccacgaggaataatccccaaagtcaccacggggtcctgcttatcaggctcgaacgaccattgacgtaaatccagagttttctgtactacgttatcagagccaaaaggggctacgccaacttgcacctgctggtcgccaattttaccgaccagagcaagacgaactgcagaccaatcaggcgtttcgataccgtcaacagacttaagttccattccagcagaaatatcagcctgcgcagcaatggattgtggggatatttcacccacaaccggacgaaagctcgggatgccgatgataaacaccagccagtaggcaaaaatagcgaagaggaagttggcgatagggccggcgctgacgatcgcagcgcgctgggcaatacttttattgttaaaagcctgatggcggaattccggggcaacggcctcggcacgctcatccagcattttcacataaccgccgaggggaatcagggcgatcacatattctgtaccttgtcgatcggttctgcgccataaggctttgccaaaaccgatagaaaagcgctcaacacggactccacagcgacgcgccacccaaaagtggccgaactcgtgaaccgtaattaagatgcccagcgcaatgataaatgcagccaggttccagagtatgctcatcataatccctaaactccccgtcagtgacggattaaaacactaacagcatcaggcaggcaaataccggcacggctgcggtcaggctatcgatacgatccagtatcccgccatgaccaggaatcagatgaccgctgtctttgattcccgcttcacgtttgaacatactctcggtcaaatccccgagtactgaggccagagccgcaaccacagaacacactaacagtttttccggaatcacatccagcggagcatagcggccaaacaaccaggctatcaacgccgatgacagcaagccgcctatcaacccttcccaggttttcccgggggaaactttcggtgcaagcttatgtttgccgaacattttgccaaacatgtaggcaccggaatccgcgccccacaccagcaacatcacgtaaagcagccaccaggcaccggttgaatgattttgctcataaccgtactgacgcagcgcaaacatgccccagaagaatggcactatggtcagaataccgaagataattctgatggttcgcgagtcacgccagaaagcagccgagcgcgggtaggtcaacaccagcaacagagcggctatccaccaccccatcgatgcccaaagcgggccactgacttgcaaatcgtgcactgtaggttgatattctggaatactcaaccacatcgttaccagcaagaaaccgcagagtatcgccagccagatgcgctgtgagtgcgaagcgaagccagcgagctgcccccactcccaagcagccagcatacatacagccagcgtcactatggcaaaaccaatcggaggcagcaaaaacagcgccccgatgacgatagggattaaaatcaaagcagttatgagacgatacttcagcaaaagttccccctaggatgcagcaacatcgttaggtgtcgttccaccgaagcggcgctcgcgttgtgcaaatgcattcagcgcaccttcaaagacaagttcatcaaaatcaggccaaaggacatcagtaaagtaaagttcagcataggctatttgccacagcaggaaattactgatgcgatgttcgccaccggtcctgatcactagatccacctgagactgttcgttcaggcaaatatgagaatttaacaaatcctcagtgatatcttcaggttgtaacaatcccttttgaacctgcccagccaattggcgcattccctgaatgatatcccaacgtccaccataattggcagcaatgttaagcttcaaaccatcattattttccgtcagcgcttcagagcgtcgaatgcgttcctgcagacgtccactgaagcggctgatatcaccaataacgcttaaacgtacgttatgtttatgcagacttttcacttcgctgtccagcgctcgaacgaaaagctccatcagtgcggtcacttcctgagcagggcgattccagttttcactactaaaagcataaagcgtgagcgcatctaattgatgagtggcggcaaaactcaccgcacggcgaactgatttcactcccgctttatgaccgaagatccttaatttaccctggcgtttagcccatcggccattaccatccataataatagcaacgtggcgcgggccttggggggacaagttagccctatcttcatttacggacgacataacgcgaacattcttcctcaataaatacgactgctcttccctaacattaggcctcatgcgcacaaaaaaagccgtgtactgaatcacggcttcttatatgacagccaaaccagagggtctaaatacccatagaaccgttaatcaagggtctgtctgcccattgacggcgcagactatatcatctcagtccgagacgaacaaattccaccaatgaataacatcaccttcaacgacttaatgcacctaatgctcgctcagcagcaattcgtgccaaacggtcaatatctaagacttcatcgactgaattgggttcctgcaatgccaaactttcgagcacatttctgtttaatctcgcaatatctgtgaaaccgatacgcgattgcaagaaagccatgacagaaatttcattagccgcatttaacactgtggtcgccgcttgccctgcgttaaaagcttccatcgccagctgcagacacggataacgctgataatcaggctctgcgaacgtcagcgggcccatacggcaaaaatctagcgcttcaacgcctgattctacccgatttgggtacgccatagcgtgggcgattggcgtgcgcatatccggtgtaccaagctgcgccagcacgcttccgtcctgatagcgaaccatcgagtgaatcaccgactgcggatgcagaatcacttcaatctgctcagccgaagcgttaaacagccagcgagcctcgatatattccagccctttattcatcatggtagctgaatcgacggaaatcttacgccccatcgaccagtttggatgagcgcaggcttggtctggcgtcattgtggcaaactgatccaacggcgtttcacggaaaggaccgccggagccggtcaggataatgcgcgatacaccattctcaatcagagaagaatagcctaactgttgctgaacgcgctctggcaggctttgaaaaatggcattgtgttcactatcgatggggagcagctgcgcacgactttctcgcaccgcgtccatgaaaagacgaccacaggtaatcaaagattctttattggccagcagcacttttttaccggcgcggatcgccgccagcgtaggtaatagcccggctacgccgacgatagccgccattacctgatcgacttcaccgagagcagcaagttcgcaggccgccttttcaccggctaatacttcggttttgctaccttgctcagacagcaaaaggcgcagcgccgcagcagaatctacgtccgccattgccgcataacgcggggcaaattccagacattgttctgccattaatgagacattgcgccctgcaaccaatgcggtgacggcgaataaatcgggattagcccgcacaacggccaatgtactgcagccaacggagccggtagaaccaagaatagtcagttgcttcatgagggtgctctgaataactgtttttatgataggaagatgcatcagtatgaaacatctgagcccgcaagactaagacatttagcccaaatatcagctgttgtcttcaataaaaccgtacagatgtaaaaaacaaagcgccgcctaagcgacgccttgcggaaccggttaacgattagaaattcattaactcagcttctttatcggacaaaatagagtcgattttcttgatgaaggtatcagtcattttctgaacttcatcctgacaacgacgatcttcatcttcgctgatagctttatctttcaacaaggctttaaccttatcgttagtatcgcgacgcacgttacgcacagagacacggccctgctctgcttcgccacgcaccactttgatcaggtctttacgacgctcttcggtcagcggaggcagcggaacgcggatcacggtgccagctgaagatgggttcagacccaaatcagaagacatgatcgctttttctaccgcggcgttcaggctgcggtcaaatacggtaattgccagcgtacgggagtcttctactaccacgttggccaactggcgcaatggcgttgcgctaccgtaatattcaacctgaataccatcaagaatacttggtgaagcacggccagtacggattttatcgatatggccctggaatgcttctacgcacttacccatgcgcacttctgcatcttttttaatttcgttaatcacgttgcgaacccttgtaaactggttacttggcaggctataccttgcagcatagccggtgaatatgtaaaccagcaattgctggttaaaagggactcagcgcacaattacgtgaagcccctgattagaacggcgctatttagcgatcaacgttccttcgttttcacccatcacaacacgacgcagcgcgccaggtttgttcatgttaaatacgcgaattggcaagttatggtcacgagccagcgtaaaggcggcaagatccatcactttcagttcacgttctaacacgtcttgataggttaactgttcgtacagcgttgcatcaggatctttcacaggatcggctgaatacacaccgtcaactttggtggcttttaacaccacgtcggcttcgatctcgataccgcgcaaacatgccgctgaatcagtagtgaagaatgggttgccggtaccggcagcaaaaatcaccacgcgattgtgacgcagtaggctgattgcttcagcccagctgtaattgtcacatacgccgttcaacgggattgccgacatcaggcgggcgttcacataggcacggtgcagtgcatcacgcattgccaggccgttcattacggtagccagcattcccatgtggtcgcccactacgcggttcatcccagcctgtgccaaaccggcaccgcggaataagttaccaccgccaattaccacaccgacctgaatacccagttcgaccagctctttgacttcctgagccatacgatccaaaacgctagcgtcgataccaaaaccttccgcgccttgcagggcttcgccactcagctttagcaggattcgctgatatacgggttttgcattggttgccatggtgttctgtcctaagcagcagtaatagtattggggatttgaccgtcatacattcaaaacacctataagtgcgctgaaagtttacggactaaattctagattggataaaatggaaccgcctgttggcggccccatttttaagcattaagactgtttgctcattgctgcaacttcagcagcaaagtcagtctcaactttctcgatgccttcgcccacttcaaagcggatgaagttgatcacgtcagctttatgctctttcagcagctcgccaacggttttgcttgggtccattacgaaatgctgaccggtcaaagaaacttcgccggtgaacttacgcatgcggccttcaaccattttctctgcgatttcgcgtggcttgccagattccatagcgatgtccaactggatttggtgctcgcgagcaacaacttcagcagggacgtcttctggtttaacgtattctggtttgcttgcagcgatgtgcatagcgatgtgcttaaccagctcttcatcagcaccggtagcggcaaccataacgccgatacgtgcgccgtgcaggtaagtccccagaatgtcgccttccagagcagcaacacgacggatattgatgttttcaccgattttagcaaccaggttagcgcgttgttcttcgaactgtgctttcagcacttcgatatcaacgattttgccagccagtgctgcatcgataacttcgtcgccgaatgctttaaagccagcatctttagcaacaaagtcagtttcacagttcagttccagcatcacgccgaatttgccgtctgcagaaactttcgccaggatgataccttcagcagcgatacggcctgctttcttggcagctttagcctgaccagatttacgcatgttatcgatcgccagctcgatgtcgccatcagcttcaaccagcgctttcttacattccatcatgcctgcggcagtacgctcacgcagttcttttaccaaagcagcggtaataacagccatttcaattttcctcggttctctcgtgaagatagttctcactgtagatacgcaaagggggcctataaaaggccccctaaccaacatatttcaatacctggttaataagggctcagtgacgagcctgtcttattattcagcttctacgaagctttcttccgcttgaacggccagatcttgagaacgaccttcacggacggcggcagcaacagcgctcagatacagtttaactgcacggattgcgtcatcgttaccagggataatgaagtcaacgccatctggatcggagttggtatcaacgatagagaataccgggatacccaggttgttagcttctttgatagcgatgtgttcgtgatcggcgtcaacaacgaacagtgcgtcaggtaaaccgcccatgtccttgataccgcccaggctgttttccagcttgttcagctcacgggtacgcatcagagcttcttttttggtcagcttttcaaaggtgccgtcttgagactggatttccagatctttcaaacgtttgatggactgacgaacggttttccagttagtcagcatgccgcctaaccagcgatggttcacgaagaactggtcgcagttatgagcagcttcttttaccgcttcgcttgctgcgcgtttagtaccaacgaacaggatcttacctttacgggaagaaatcttggtcaactcagccagagcttcgttgaacattggtacagttttttccaggttgatgatgtgaactttgttacgtgcgccgaagatgaaaggcttcattttcgggttccagtaacgagtttggtgaccaaagtgaacaccagcctgaagcatgtcgcgcatggaaacagttgccatgattaaaacctctatatttaacgattggggttatgcctccacgtgtcccataacaccgaccccacaagcctccgctataagacagcgactttagggcaccccggtgtatgtgccgacacgtgtgtgttatttacacatatgagtgcgattagtactacttggctgaagactcattgctgccctaaggacaaatgacgcagagcggatcgccggcgcgctttataccataatccggcaccatacaccaacttttgttgcatttcgtggcagcataaaaaggaaagtttggcagcaatttgctgggctggtaccatgtgcaacagcattttttacttatttaatcataacagcggccacgctctggcccctgtggaccttttcttcatggctatcacaattaaaacacctgcagatatcgaaaaaatgcgcgttgccggccgcctggccgccgaagtgctggaaatgatcgaaccttacgtaaaaccgggcgtaacgaccggcgaactggatcgtatctgccacgatcacatcaccaataagcagcaggctatttccgcctgtctgggctaccacggcttcccgaaatcagtctgtatttctgttaacgaagtcatttgccacggtattccaagcgacgataaagtgctgaaagacggcgatatcgtgaatatcgacgttaccgtaatcaaagacggtttccacggtgatacgtccaaaatgtttatcgttggcaaaccaactattctgggcgagcgcctgtgccgcgtcactcaggaaagcctgtatctggcgattaaaatggtgaaaccgggcattcgtctgcgcaccttgggtaaagagattcagaaattcgtcgaagcggaaaacttctccgtagtacgcgaatactgcggccacggtatcggtgaaggtttccacgaagagccacaggttctgcactacgatgcagatgacggcggcgtggtgctgcaacccggtatggctttcactatcgagccgatggttaacgccggcgattaccgcattcgcaccatgaaagacggctggacggtaaaaaccaaagatcgcagcttgtctgcacagtatgagcatactattgtggtaactgagaacggctgcgaaataatgacgttgcgtaaggatgacaccatccccaacatcataacgcacgagtaatgacgacaagccggcaatcgccggcttttttatgggctgcgttttatatcaggaacccctatgtctgaccacaacactgaaaaccctctcccatcggcatcagtgagggctctccctgagcagcctgcatttcccagcacttattctgatagcgaactccactgccaaccgttgaaacaacgtctggaaaccttccagaactggctggccgacgccttcaatgcaggggtgagcgcggaaaaactggtggcagcccgtagcaattatattgatgctctattacagcgactgtggtcattttatggctttgagcatattccgcagaccgcactggtcgccgttggtggctatgggcgcggcgaactgcatcccctgtccgatattgatgtattggtattaagcgagcagcgtttaagcgatgagcaggcgcagcgcgtcgggcagcttattaccctgctatgggatttaaaactggaagtcggtcacagcgtacgcagccttgaagagtgtctgctggaaggcttggctgatttaaccgtcgccaccaatttgatcgaatcccgcatgatttgcggtgatgtcgcactgtttttgcaaatgcagaaacacattttcagcgacagcttctggccctcacccgaatttttcgatgccaaaattgccgagcaacaagagcggcacaaacgctaccacggcaccagctataatctggagccggatatcaaaagcagccccggcggcctacgagacattcacaccttgctgtgggttgcccgccgccactttggtgccaccacgctgagtgaaatggtcgagttcggtttcctgaccaaagcggaaagcaacgagcttatcgaatgccaaagcttcctgtggcgcatccgttttgcccttcatctggtcttaaatcgctacgataaccggctgctgttcgaccgccagcttagcgtggcacaactgcttcgttatcagggagaaggcaacgaaccggtggagcgcatgatgaaagatttttatcgtatgacgcgtcgtgtcagcgaactgaacaacatgctgctacagctattcgatgaagccatactggcactggatactaatgaaaaaccacggcctttggatgatgatttccagctacgcggcaatctgattgatctacgggatgagcaactgtttatccgccagcccgaaaccatcatgagaatgttttacctgatggttcgcaatcaggatatcatgggaatctattccaccaccgtgcgccaactgcgccacgctcgccgccacctaaaacagccgctgtgtaccattccagaggctcgtaaactgtttatggctattctgcgccatccgggagccgtttcccgcgccttactgccaatgcaccgccacagcgtgctgtgggcctatatgccacagtggggcagtattgtcggccagatgcagtttgacctgttccatgcctacaccgtcgatgaacacactattcgggtattacaaaaactggaaagcttcgccgacgaatcaactcgtccgcgtcatccattatgcgtagagctatatccgcgcctgccgcagccggaattactgttgctcgccgcgctgttccacgatatagccaaagggcgcggcggcgaccactcaattctcggcgcgcaggatgtgctggaatttgccgaattacacggattgaactcgcgggaagctcagcttgttgcctggctagttcgttgccatttattgatgtcagtgacggctcagcgtcgtgatattcaggacccaacggttattcagcaattttctgccgaagtacaaagtgaaacgcgcttacgctacctgattagcctgacggtggctgatatttgtgccaccaatgaaaacctgtggaatagctggaagcagagtttattgcgcgagctatatttcgccactgaaaagcagctgcgacgaggcatggaaaacagtccggatctgcgagagcgcgtgcgccatcaccgcctccaggcgctggcattactgcgaatggataatattgacgaagaagcgcttcacagaatctggagtcgctgccgcgccgattatttcctacgccattcaccaaatcaattagcctggcatgcccgtcacttacttgagcatgattccaccaaacctttggtgctagtcagtcgccaggctacgcggggcggcacagaaatctttatctggagcccggatcgcccttccctattcgctgccgtggtgggtgaattagatcggcgtaatctgagcgttcacgacgctcagattttcaccaatcgtgacggtatggcgatggatacctttatcgtgctagaaccggacggcagcccgttggcgcaggatcggcatccggtaattcgtcatgcgctggaacaggcaatgacacagccgaactatcagcatccgcgggtcagacgtttatcgcccaaactgcgtcatttcagcgtgcctaccgaggctaacttcctgccaactcatacagatcgccgtagttatctcgaactgatcgccttggatcagccgggattattggccagagttggggaaatatttgctgatttgggattatcacttcacagcgctcgcatcaccactattggcgaaagagttgaggatttattcgtattagcagataaggatcgtcgggcattgaatgccgaaacgcgaaaggaattagcacaacggttgacagacaccctcaatccgaacgataaactgtgatacaaataactttttaacgattattttttcttacaacctttcaacttcaggaaagagaaccggatgcagcaactacagaccgttattgaaaacgccttcgaacgccgtgcagagatcactccggctaacgtagacaccgtaacgcgcgaagccattaaccacgttatcaatctgttagataccggcgcattgcgcgtagcggaaaagattgaaggccagtgggtaacacatcaatggctgaaaaaagccgttctgctctccttccgcatcaatgataaccaagtgatggaaggtgcagaaactcgttattacgataaagtcccaatgaaatttgctgattacgacgaagcgcgcttccagcgcgaaggcttccgcgtcgtacctccggctaccgtgcgcaaaggcgcttacattgcccgtaacaccgtgctgatgccttcctacgtcaatatcggcgctttcgttgacgaaggcaccatggttgatacctgggcgacagtaggttcttgcgcacagatcggtaaaaacgtgcacttatccggcggcgttggcatcggcggcgtattggagccattgcaggctaacccaaccatcatcgaagataactgcttcgtaggcgcacgttcagaagtcgttgaaggggttatcgtcgaagaaggctccgtgatttccatgggcgtattcatcggtcaaagcactcgtatttacgatcgcgaaaccggcgaaattcattacggtcgcgtaccggctggttcggttgtggtttcaggtaatctgccgtccaaagacggtagctacagcctgtactgtgcggttattgtgaagaaagtcgacgcaaaaaccttgggtaaagtcggcattaacgagttattacgtaccatcgactaacattcaactagcgggccaatcagcccgctatttttttgtcttgtaagcagttatcgcctgcaatcacatattatggcaacaataaccgccataatagaaactgtggaatataaaaccaataaggtggcgctatgtatgacaacctgaaaagcttaggaatcactcaaccggaagatgtcgatcgctacagcctgcgtcaggaggccaataacgacattctgaaaatttatttccgcaaagataaaggcgagttttttgctaaaagcgtcaaattcaaatatccgcgtcagcgtaaaaccgtagttgcggacaacgccggacaaggttacaaagagattcacgaaattaacccgaatctgcgttatgtgattgatgagttggaccaactttgcaaacgcgatcaagttgaagtggacttgaaacgcaaaattctggatgacctgcgtcatttggaaaacgtggttgctcacaaaatctctgaaattgaatccgatctggaaaaactaacgaaaagcggccgctaatacctgcccataatccgttaggaacaagatagacaatcacaaaacaaacagtaaaaagtggcgatatctgttcgccacttttatttacatcaatttatttacgctgagcgtgtgagcacggctacggctggattccaacccggtttatttcagcaactggccccattgctctacccacgggcaggaaaccgcctcaggctccggctgctcaatcgcatcaatttccaagatctcgccgatacgcgtcgcgccctgctcctgcaataaagcgtcaaaagcacgacctgcgccacagtagttatcgtagctgctatcgcctaatgcaataacgccgtagcgcagctcaggctggtaaccaacctgatcgcgcacagcctgaaacaacggcgcgatattgtcaggaaaatcaccttgcccagtggtggacgtgatcactaacgcataatgctggcgataatattgccaggcttccagcgtaccttcgtcaaatagcttaacttcgtggccttgctcattcagtatgttttcagcttcttccgcaactaaaagcgcattgccataaaccgtaccgacaaaaatacccacctgagccataaaaaaccttctttaaattaccaataagttactcactatcctgaccttcgtcgccaagaaactcaaccctttcaagctcagggagaaggccttcccagccaaattgtgacatcacgccctgccaggcactgtcccagcgcgcagatagcgccaaggattcaccggtgaccggatgattcagcgataaatggctggcatgtaacattaaacgtgagcaatcaaaatgttgcgacattccgcgattctgacgtaaatcgccatgcgtgctgtcccccagaatcgggtgacgaatatgcgccatatgacgtcgtaactgatgtttacgcccggtttccggagtcagttccatcaagctgtagcgagcggtttcgtagcgaccaatagcaaccggcatctcggctctcgctaacgcacggtaatgcgtaatcgctggttttggcgctttatcccggctggcaaacttatcggcaattttgtccaactcttcggtcaaagcgtagtcgagagtgtcgtcttctaacacataaccgcgtacaaccgcatgataaaccttcttaacttcatgttgttcgaactgttgtgacaatgcgcgtgccacttcgctagacagcgccatcaacaatacgccggaagtcggacgatccaaacggtgtagggtatacacatgctgtccaatttggtcacgcaccgtttgcatcacaaaaacggtttcattacggtcaagccagctgcggtgtaccagccaaccggcaggcttattaaccgcaacaatatgttcatcttgataaagtatttcgagcattattcgctttctatgtttaacaggtcatcgagacgctgcaactgcgccagaagaagactgcaatccgtctgatgatctttcaacgccacctcaaaataaggcgttacggcaaagcgggtcggtaagggagcatttttttctagcagcgcattcattcgcggtagcaatacccactgaagccattgctcagcggccatggtatcgacgcaaaaaggctcaacgctttcaaaggcctcagcctcaggcggagatgactgccaaagattaatggtgcgtaatgccagatcgatatcctgtaaaatctggcgtacctgattgtttagactcatgttttaattctcgaccaaaaatgggccaacacaggccagaaaggaaggttcactccagataatccggatgaaaacaaaagcgcgcaagcataccatcgaagcgcaggagacccaactatcggctaactaaatccgctatcagtaaactaattaaaggaagcgagcctaagccgcagtgaaaaaaagcataaaaaaaggggtactgtttgaccagtacccctctgttcgttttatagcaatccagctaaattgatgctccctgctcaatccttgaaaacttttcctgcggttatcctaaccagcaatccttcgcgatgtcctacaccatcctggtgcgatccttaggtcatcctaacccaccaataatcctttatcggctccctatctccatcctggaggtgtcccttgtttcgtcctaaaacatcccttcactcgtcctgagcagtccctgatttccttcatcctgaagctgcatcatcccgatgctgttcctttccaaccagatcctatctggtgaataaaggatcgcttaattggcgaacagagacaagatactgtaaagcctcttatctatacgttttaatagacaaaaaattgaatgtttataacggagtgattttattgagaataattctcacgcaagaaaatcatcttcaaaaaatagaagctatgtcttacaggccgtgtgagagatctctcacacggaaatcagataaccttaattaaattaaggtttagattggcattactgggcgcaatgcatcgaggaaatggctcaggttggaggctaaaagcgtacgttgattactgccaaagtgctccaaaacgacattgccagtaacgttgcacagcgatgccattgtcatttcagattctgtcgttgccagaaacagcgtcggggacagtttgagccgtttttgcgtaaccaaatgaccgataaggttttcctgtaatcgagtaaaatcatcctcactccatacctgcaacagagtaaaacgatgatcgcccaactccgcggtcatatctcccgcatactgctgcgtgtaaaaggtatgaatatcgtcatgtaactggatttctaacgcgcgagccacgttttctaacgttgctgccggcaagaatggctgcggaagccaataaatctgatcctcgtgcgtttccgtgatacaaggcgaagccaccccgtacaactcgtggctggctggcgcatgggcggtttgctgctgccatagttcaacgtagcgctgcgtaaagctctgtagagcggttgaaacattctggtccatattttctctcaacatccgataagcctgcgctaaactgggaaacgaaacttcgccttcagcgacaatgcctagcgcggcataaatggtaaactgtcggctattgtaccgatctctcacctagggaacagcatgtcttcatatcaagatcatcaggctctggccgaactcactttaggtaagcctaccgcttaccgtgaccactatgatgcggccttgctacaggcagttccccgcagtatgaatcgcgagccgctgggattatatcctgataaccttcccttccacggcgcggacatttggactatgtatgagttgtcctggctcaatgccaacggcttgccgcaggttgccgtcggcgaaatcagcctgaatgccgatagtgttaatcttatcgaatccaagagttttaagctgtatttgaacagctttaaccagactccgtttagcgattgggaaagcgttcgccatactttacaacaagacctatctatctgcgcgcagggcgaagtcagtgtcacactctataaactgagtgatatagccgggcaacctattgctgatttccatggagaatgtctggatgaacaagatattcgcatcgataattacgaattcagcaccgattatctgaaagatgccacgggtcaacagatcgttgaagaaacgttggtcagccacctattgaaatccaactgcctgatcactcatcagccagattggggttcggttcaaatccgctaccgtggcccacaaatcaatcgtgaagcattgttgcgctatctggtttccttccgtcatcacaatgaatttcatgagcaatgtgtggagcgtattttcaacgacttaatgcgcttctgccagcctgaaacgctgtcggtctatgcccgctatacccgccgcggcggcctggatatcaacccttggcgcagcaataccgacttcactccgtcgaacgggcgtttagcgcgtcaataatgcgtgccattacgcaacattggcagtaaaaatctcgttagtattggcaaaaaacaagggacaacgttaaggtgaattgaagtgtgttacggcaataatgaacgataaagactgccgtcacctgaagaacaatttatgtgatatttcaatggagacatcgagagcggagctctggtacgcaaaaaagcgagatcataaagagaatagccgctctctggtgcaatgcagttacgacggcccctctgcggggcgtaaaggagtcattttgattacacatattagcccgcttggctcaatggatctgttgtctcagctcgaagttgacatgctaaaacgcactgccagcagcgacctttaccgcctgttccgtaattgctctctggcggtattgaattcaggtagccagaccgataacagcaaagagctgctatctcgctacgaaaactttgatatcaatgtgttacgtcgcgagcgaggcgtcaagctggagcttgtcaatccgccagaacatgcctttgttgatggacgaatcatccgttcactacaagctaacctgtttgcggttctgcgagatattctgttcgtgaatggtcagatcgtcagtgccggacgtttccagcacctgaatatggaaaactccagccatttgaccaatctggtattttctatcctgcgtaacgcccgcgcactgcatattgatgaagatcctaatatggtggtgtgttggggcgggcattctatcaatgaaattgaatatctgtatgcccgcaaggtcggtagccaactgggtctgcgtgaactaaatatttgtactggctgcgggccaggtgcgatggaagcgccgatgaagggcgcggcggtaggccatgcgcagcagcgctatagacaaggtcgtttcatcggtatgaccgagccttcaattattgccgctgaaccgccaaatcctctggttaacgaactggtaatcatgccagacatcgaaaaacgtctggaagcctttgtacgcatagctcacggcattatcatcttccccggtggcgttggtaccgcagaagagttgctctatttgcttgggattttgatgaatcctgaaaacagcaatcaagttttacctttgattctgaccgggccaaaagagagtgaagattatttccgggtattggacgatttcatcgtgaatacattaggagagaaggcgcggacttactatcagattattatcgacgatccggacgaagtggctcgccaaatgaaaaaagccatgccactggtgaaagaaaatcgccgaaataccggcgatgcctatagcttcaactggtctatgcgcattgaaccagacttgcaattgccatttgaaccaacccacgagaacatggctgcactgaatttataccctgatcaaccggcagaaaagctggctgcagcactacgtcgggcattttcaggcattgtggctggtaatgtaaaagaagtcggcattcacgccattgaggcttatgggccttataaattacacggcgacccacaaatgatgaagcagatggatcatttgctacagggctttattgctcagcatcgaatgaaattaccgggcagcgcatatacgccatgttatgaaatctgcccttaaacgcgagcggctacgcgtgctcaataaggtttaagcggcagtgaggataatccccgatacttagtcattctaagtatcgggagagtacggggagtaataaagtcgatgcgatagcatgacgtatcagaagtatcagaagtatcagaagtatcagaagtatcagaagtatcagaagtatcagaagtatcagaagtatcagaagtatcagaagtatcagaattatcagaattatcagaattatcagaattatcagaattatcagaattatcagaattatcagaattatcagaattatcagaattatcagaattatcagaattatcagaattatcaataataccgattttattttcacccacacaatttcgactatcaggactcttgccttcaggttatggatatacaccttcttatcgttgacgctctcaatctcattcgccgcatccatgcagtgcaaggttccccttgtgtaaatgcctgtacccatgcattacagcaacttatttcacacagccagcctacccatgcggttgccgtttttgatgaggatgaccgttccgatagctggcgccaccattgtttgccggattacaaagcagggcgatcgccaatgccggataatttacagcaggaaatgccgcagcttagacaagcttttgccgaactgggcgtcccctgctggcactctcccggcaatgaggccgatgatttagccgccacgctagcagctaaaattgccggagccggacatcaggtcaccatagtttctaccgataaaggttactgccagttattggtgccaaacgtacagattcgggattactttcagaaacgctggctggacttaccattcgtcaaacaagagtttggcgttgccccacatcaattacctgattattgggggctagccggtatcagcagcagcaaaatccccggcgtagcagggataggcgctaaaacggcagcggtgttattgcaacaggtcaacagcctggaagagttatatcaaaacctagaacaggttccggaaaagtggcgaaaaaagctgcaacagcatcaggacatggcctttatctgcaaacaggtagccacgcttaaaacagatttaccgctgaacggtaacctgcaacagctacgcttaggccatagttaagggagcaatcggcctaatgctggtcacttaaggtgaccaactgcctttttatccgagctggtaagattacgggcatgctcaggaaaagtgagattgataatgccgagggcttgtgaaagttccattaaaaagggttcatgcagagacatgaacccttttacatcaaccaacggatcggtcaaccgctcattaaacgatcggcattagccaatcgcccccctgattttacatcttagctattgaatctctgccgttgacccgaaggttttaaagatcggggtttgaacgtttaattttgaatcccgagcgcccaatcactcacgtttggctgtgagtgaaatcatagatttagctttaaccaacaactaaatacgttcatctctacgacctggaacgccagcccagatacgacgaacatgcacggtcacttcctcacgatcgtgataaagctgtttagcctgaatatgcgcattaataccgttttctttcaactgttcatccatcatcgccaggttttgcaacacttcttcgtagcgctttttcattggcaatttaagattgaaaattgcctcacgacaccagccattgaccagccagtcggtaatcagctgcgttactcgcgctggcttttcaaccatatcgcaaaccagccaatagatattgctgcgcgttggctcatatttgaatccgtccgcacggtgatgagtcacctgcccggtatccatcagactctgggccatagtgccgttatccaccgcctgcaccatcatgctgcgttgaaccagctgataagtccagccacccggacaagcgccgagatccaccgcgtgcatgccgcttgccaagcgttcttcccactcatccgcaggaataaattcgtggaaagcctcttccagcttcagcgtcgaacggcttggtgcatccgaagggaatttcaggcgcggaatccccatatacagaggagagttgttgttactgtaggaataaccgacataacagcaaccagaagcgataaagaatacgtgaaccaccggacgatgcggattttcacgagtctgcaaaatcttctgttcacgcatcgcggcacgcagcggcaccgtcagtttgcggcagaatttaagcaattctttactctcattggtgtccggcacttcaactcgcagttcaccggctttttccaccacgccgaccaacatccctacgatcggagacactcggtcttccggcggcagatcctttagcagttcgccaacaaccatcatttgccgagcaaaaatcagctctttaaacggcagctcgcgaatcaggcgatccgcatcttcatgctggtaacactcgaataagacataaccgctattatcttttacccgagcaaaaccaaagacttcgtgttctgcggccttggcggtaatttccgccgcacactctttttcaaagccttgacggcaatataaagcaattttattcatggcgttctgcccttttccgtagacgcagcgcgccaatcaacatcaaaatccatcccgccagaaagcatacgccgccaatcggcgtgacatatacccaaagtttcaggtgcgatagagccaggcagtagagactgccactaaataacacggtgccgagggccaataaagcgccgctccagtaaaaccaaatactgatctggcgctgcatagcaacggccaaagcgagaatagccagagtatgaaatccctgatattccaaaccggtacggatccaggccatttcatttacgcccagacttccgcttaatacgtgtgcgccaaaagcaccaaaagcgacatagaaaaaaccgctgatagcggcaaagatcagcatcaaacgaccactcatcgttatttaccttattttatagatagttaccgtggtgaaattaggtaattttgcgttttttcacgatcaattttcgtagcggaatcgtaatttctcttgttcactggctgcccgagccagaatccactgacgaaaggcagctattttacccagttctgcctgactgtcatgacaaaccagataaaaagcatttttacttaccagaacctcattgaacggacataccaaccgccccgcttcgatttcggtctgagccatcacattattcaccaaagcaataccctgaccgtgaaccgcggcctgaaccaccatggcactgtgactaaaaatcggcccctgctgcacattaatttgcggaacgcccaactgacgggtataggccaaccagtcgcggcgggaagtatcatgcaacaaagtatgattagccagatctgccggcattttcagcggatgttcgcccattagcaggctaggagcacaaactggcagcagaaactcggcgtacaatctttcggtgcgcagccccgtccagttgccgcgaccgtagaaaatagccacgtctacatcatctgccaatttatcttcttcacggtcaacggcctggattctgacgtcaatccccggataagctgagttaaagctagataaacgcggaaccaaccattgaatagcaaaactcggcggtaaactgaccgttaatgcccccttggcgctacgggcctgtaatttgcgcgtagcttcgttaatcgaagtgaaaatttctttaatatccaggtagtaactttgcccttcttccgtcagcagtaaggaacggttacgtcgacggaaaagcttcaggcccagaaagtcttccagagatttaatctggtggctaacggcggcctgagtgacaaataattcatccgccgccttagtaaaactgaggtggcgcgcggccgcatcaaacacgcggagagcattaaggggtggcaatcgttttgacatgaattggatacttttttataacggctcatccgcggatgaaaccctttgtttacttattagtttttgtaatgcgagccattataaattgtccgttgatgatgcgccagcaaatacctatagtggcggcacttcccgagccggaacgaaaagtaagtttagtatccaggtactgaattgcttttggctttgtggttgtgatgttgtgtttgcaaatggtctggaatgccagacatagtagctaagctactgttttttcacttcctgtacatttaccctgtctgtccatagtgattttatgcagcaccgccccataaagcggtgcttttttttatcttaagtttaagcttcactgcgcgttgcacgtcagaaaagcttaaacttaatcaggtagtcaggctaaaatccgccggtattatttcccttccgccatttcttttacttcggaacggttaatttgctgttctgtgccgttggcatcaatgtaactgatcataccggtatcattatcgactttaggtttaccatcggcgacgatggtgcgaccatcattggtatgcatgacatagttgcttgagcaggctgcgagagtaaaagtaagcattaaagcggaaagtacggcagctgtctttttcatggatcactccttgcagattaaaatactgaaaaaaataatttagattattaaattaattattcgccagacactattcagcataacaaacttattacatatttccatgaatctgggcaattagcgggctaattacccgttaaacaccgaaaaataagaatgatcttagcttttcagaggatttgagcactgtatgaagtcttttaaccccgcagcttttcgcgcagaattcccggctatcaatagttcgggaatttacctggatagtgccgctaccgcgctgaaaccccaaggggtgattgatgccactcaacagttttatgcgcaagatgcggccacggtacatcgcagccagcatcaggccgctcgttccctgaccttgcgttttgaacaagctcgtcagcaagtcgctgattttattaacgctcctacggcagaaaatattgtctggaccaaaggcactaccgaagcgattaatctgatcgcgcaaagctacgctcgccctcgcctccaacccggagatgaaattctggtgagcgaagcagaacatcatgccaatctgattccctggctaatggtcgcagagcaaactggcgcaaccttggtaaaactaccgctgggcagcgactttctccctgattttcagcagctacccgcgttattgaccgggaaaacgcgcattttagcgctggggcaaatgtctaatgtcaccggcggtatgcctgatttggctttggctatcgatctggcacacagtaaaaactgcatagtggtcgttgatggtgctcaaggtgtggtacacagcccggcggatgttcaggattttgatattgatttttatgttttttctgctcataaactctatggcccgacgggaattggcgcgttatatgccaaaacagaactgctggaagaaatgtctccttggcaggggggcggtaaaatgctgactcaagcttccttcgccggttttactccgcaggatgctccttaccgtttcgaagcaggaacccccaatatcgccggggttatcggcctgtccgccgcacttagctggcttgaaaatattgatattgaagcggcagaagaatacagcagtggtctggctacgttagcggaagaaaaactgagcaaactggacggatttcgcagttatcgttgctctcactccagcttgctggcttttaactttgacggagtacaccacagcgatttggtaacactgctggcagagcaaggtatcgctctgcgcgccggtcagcattgtgctcagccgctaatgagtgcgttgggtatcagcggtagcctgcgagcctcgttcgcgccctacaatacccgtgaagaagtagaaagcctctgctcagcgataactttcgcgctaacattattgcaggattaatgaaaacctcaggaaaagctgaggctcactgaatagaaaagagaagaaaatgaccgccccacatccatttggccaagaagttacccgcgacgaccttatcgagaaattcagtactctgaaacagtgggaagatcgctaccgccaactgattttgctggctaagcagttaccgccgatggatgaatcgctgaaacaaactgaattcgaactgtccggctgtgaaaaccgagtctggcttggccacgaacttttggcggatggccgactgcatttttatggggacagcgaaggccgaatcgttcgaggtttactggcggtattactgaccaatgtggaagggaaaacgccccaacagattttgaatcaagatccgttagatttgtttgatcgactggatctgcgccaacagctaagcagttcccgcgccagcggtttacaggcactggcgcagggcgttaaaacgattgctgctcgctatcagaatccgatttagaccgcctcaagttgtcgcgccgcttttgccagcatttttttcagggcatgagagaccgcaacaaaaccgaaggtggcggtgaccatagtcaccgaaccgaatcctgaggcgcaatccatctttttagggccttccgcagtgctgcgggaggcacagacggaaccatcaggttgcggataaaccagcggttcagtggaaaaaacgcaatcaatcccgagcttacctttgctgtttttcactacgttataatcgcttttcagcctttcacgcagtttagctgccaacggatcctgaatcgtcttggctaaatcaacaacttcaatccgagttggatctatctgaccgccagcgccaccggttgctataaccggaattctatagcgacggcaataggccagtaatgccgctttgggacgaatgctatcaattgcatcaatgacatagctaaagtttcgatccagcatctcagccacgttgtctggcgtaataaagtcatcaatgcaggtaacctgacattcagggttaatcgcccgaatacgctcggccataacctctgttttagactgccccacatattgtctcagcgcatgtacctgcctgttggtattggttacacacacgtcatccatatcaatcagagtaatggcaccgataccggttcgggctaaggcttctgccgcccaggaacccactccgccaataccaatcacgcaaacgtgagcctgcgaaaataccgccagcgcctgttgaccataaagacgggctatgccaccaaatcgctgttgataagcttcagaatacagtgtgctcataaccttatttgtaccttatagagaaataacctaaaaccagtctacgaatgcaaaagcggccaattggccgcttgataagctgtgactgtaaacagagtcacgccatgagtcgcctagttgttcactaaaagcgaagagctggaaggcgtgttagctttatcacctttataagcggtaaacattgggccaccgctttgagcatttttcagcacccatacacggccataatggttatagaaaccagcagcctgaccggcttcatgaccaataccctgataaatatcgaaatgctgacctttgattgctccaccgacgtccagtgcaaccatcaggcgcatttgatattgcccggtaaatttgccctgttcgtccagcagcggcacttcggccagcagcgttgttcccgcaggaattaatgaacgatccgatgcaacggaagctttcgcaatcaatggaaccgcgctcgcaccttttaccggggcgtacatttccggtttaaagaacacaaaggacgggttctgctctaataactctctgacttcagcttcactgtgcgtttcagcccatttacgaatagcctgcatcgacatatcggccttagcgacttcaccgcggtcgatcagcactttcccaatgctgcggtaagcatggccatttttgcctgcgtaaccaaagaaagtcagaggccgcccatcaccaaaatctacgtaaccgctgccctgcacttccatcataaagttatccatcaacgaattggtgtaagcgataactaaattgcgatcatccaatgcgcccgcgtagattccggcgcgatccggcagacggcctttgccttttttagatggcatacggtacagaggatgacggaattctccttgcggcgtatagcgagcttgtaaaaccggagtgtaatagccggtaaactggacgtttccaaaattatccaccccttccatttgataagcgttcaaaccaaacaggctgagtttgctggtatccgcacccgctaacatccagttttggactgcttcaaaagtattactgtggcggttgtaaagattaggtgaagcctgattaatcactttcacctgatctgaataatcttttgcgttgaccggcttacccgtggcgctgggttcattcaccagttccagagaatggctcaatcgaccatccttatattgttgaccacgatcggtgggccgtgactgacaaccagccaatactgcaatcattaatccgctcagtaggtatttgccccaacgtcctttcattacacgccttcttatacacacattttatcttccggctgaacgataacaaacgcctatggataaaggaatcagtagccacaaaaaatcatatactgactcatattgcccattacgtagaaaaacaaaccacatagttcacaaattagtcaattgattgtctttatgcagtttaaatgccaaaagcacttgcaagaaatgtgatccagagtatagtgcgctgaatcggacgcggggtggagcagcctggtagctcgtcgggctcataacccgaaggtcgtcggttcaaatccggcccccgcaaccaaccgatactgattaccagcagtatcaaatgtcgtccgatagtcttgaaataatagtaaaataagttgttagacggacgcggggtggagcagcctggtagctcgtcgggctcataacccgaaggtcgtcggttcaaatccggcccccgcaaccaacaacttgatagtcagtagaaaataagcattaagacggacgcggggtggagcagcctggtagctcgtcgggctcataacccgaaggtcgtcggttcaaatccggcccccgcaaccaattcttaatcacagttttctaactcaagacaccctcaagggtgtttttttgtttctggcctccggaaactaccctatcccgtctgacttccctaatgtatttccttactccattcccaatcagccaatccttggaccgataaattccaaagcgccttaataccattcccagcgccattacacccgagcaactgccccaccgttagcaaagtaagctttgattccggcaaatacagattcagcaatttgttgttggaaatgactggtacgtaatttacgttcttcttctacgttactgataaaggcggtttctaccagaatcgaagggatatccggcgcttttaatacggcaaatccagcttgatcaactcgatttttatgcagtttattaattttacccaatcgatgtaacacttctttaccaaattttaggctgtcgttaatcgtcgcggtctgtagcaggtcaatcatggtgtgatccagatagcggtcgccgcttttactgacgccgccgatcaggtcagcctcgttctgggtttgcgccaggaatttcgccgccgtactggttgcacctttggtggataacgcaaataccgacgaacctcgagcggctctattggtaaacgcatctgcatgaatcgaaataaacagatcggcgcgctgcttacgggcttttgccaccctgactttcagcgggataaacacatcttcatttcgcgtcataaatacccgcatatttggctcacgctgaatcagcgcgcgaaggcggcgggcaatttgcagcacaatgtctttttcgcgagttttgtttttccctattgcgccagggtcttcgccaccgtgcccaggatccagcataataacaatcgggcgatcacgtcctgccttacccgcccgagccgattcggccggcaaggttcgctccacgttacctttgttgtaatcctcaagtagcgccaacaaaggatcgtcttcctcggaaacgcctcccttagcgggataaagatcgacaaccagacggttacggaatttggaaacaggcttcagggtaaacagctgcgggctaatactttgcttgagttccaatactagacgcacggtatttttatcaaactgtccaacgcgagcctgctttaagtaaggatcgccagattggatttgctcaccaatctctttcagtacgctattgagatgaacgccttcgatatccaccacaattctgtcgggattcgttaaagcaaattggcgatatttaagtggcgtattcgattccaacgtcacacgggtataggttgaggaaggccataccctaacggcaactacctgagatgcggaggcaaatccaacctgactaacactgagtaaccaggttgcagctacgccttgcagtaaacggcgacgcgcgggattatgatctgaatttgccatggaactccaaagtaactaccaataaacgatgaaaaaacaaccaaaaaagataatgatggcaaaactttagcgaatcactcctcctctgtcatcagaaaacatttttatgttattcaatttattactctctcatagccatacacatgcatttaatagcaatttcttgcttgccttcacggccacaaaagaataaaaatacaaaaataccgaataaaaattcaaagagggtctgccgtgaaggaacgtagtactgaactggtccaagggtttcgccactcagttccctatattaatgcgcaccggggcaagacgtttgtcgtcatgctcggcggggaagcgatcgaacatgaaaacttcgccaatattgtcaatgacatagggctattgcacagtctagggattcgtcttgtggtggtttatggtgcccgcccacaaatcgacagcaatctcgctcagcataactatgaacctatttatcataagcatactcgggtaactgattcccgaactctggagttggttaagcaggcagcaggattacttcagttagatatcaccgctcgtttatccatgagcctgaacaacacgccactgcaaggtgctcatatcaacgtcgtcagcggtaactttattatcgcgcagccgctcggcgtggatgatggtgttgattattgccacagcggccgtattcgccgtattgatgaagaagcgattcatcgtcaactggatagcggggctatcgttctgatggggccggtggccgtttctgtcaccggagagagctttaatctgacctctgaagaggtggcaacgcagcttgcgattaagctaaaagcggaaaaaatgatcggtttctgctcatctcaaggggtaacggatagagatgggaatattatttccgagttgttccccaacgatgcccagaaacgcattgaagaactggagcaagaaggcgactaccactccggcacggtacgtttcctgcgtggggcattaaaagcctgtcgcagtggcgttcgtcgcagccatttactgagttatcaggaagatggagcactagtgcaagaactgttctcccgcgatggtatcggtacccaaatcgtaatggaaagcgcagagcaggtaagacgtgcaactattaacgatattggcggcatactggagcttattcgtccattggaacaacaaggtattttagtgcgccgctcccgtgagcagttagaaatggaaattgataaatttactatcatcgagcgtgataatttgactatcgcctgcgcggctctctatccattcccagaagaacacattggcgaaatggcctgcgtagcggttcatcccgattatcgcagttcgtcccgcggtgaaatgctgttaaagcgggtagccaatcaggcacgccagatggggctgaaaaagctgtttgtgttaaccactcgcagcattcactggtttcaggagcgcggttttactcccgcagaagtggacgttttgcccgttgagaagcaggaactgtacaattatcaacggcgttcaaagatcttgctggcagatctatagctcattgatataaatagcccgttgatataaataaatttgaatctgagaatttaaaaagcgcagctcgttaccggtaaagctaataatcgatggtacaaattattagtgggggttcgagctgtaacttttatttatgggcagcgcttatgtgtagatagatgtcgatgcgtagatgctgatgcgtcgaaacgacagatttcttatacgacgaacgtcaaaaaccaagcaaacaaaaaaatagcaacaaactgatttataacgatttatacatccccctgccgttactcttttttgatcatcaacataccaaaacattaactgaaagcccatcacctaacccttccgctgataagctttaccaggctttccatccgcttacgttgagatattgcgaccatttcccccattaaacatggcacccaaatcaccggctaaacgctagcgaattaagcgttccaccaaaccactgcgtcgctgagttggagtcaatattgcgctggtcaataccttatcagtgcaatagagcgttaagtgcttccgagcacgggttatcgccgtataaaccaattctctggtgactaccggaagaaaatggttcggtaaaactaacgccgtgtgctcaaactccgatccctgagacttatgcacagtcatcacataggctgtttcatggctgggcaaacgactcggttgtaccgatttaatgctgccatcaggtaactggaaatgaacgcgtaaatcgccttcagagtcatataaagcaataccaatgtcgccgttgaataacccaagggcgctatcattgcggtcaatcattacaggccggccaagataccagcgacctgatggcccaggaatccggcgaatcaatcctttctggttgagaatctgctcaattcgttcgttcagaccgctaacgccaaatggcccggttcgaagcgcacaaagcaactgataacgaccaaattcagtcaatataacagcgggatcggccccctcaaccacctgctgcaaataacgctgataaccgacgaggctatggtgtaatagaagttggtagtcctcagcgtcagataacgggaaatactcaatatcttcgaagttgccattcaatatggagagtgcctcacgaggcttacccgcgttgaccgctaacgccagttgtccaatgccggatttctcatcaaaacggtagcttttccggagcaaacacaggctatcgcgtatatttgccgcgttatcgatagcagttccagcaagctggcaaccggtcagacgcgtcagctcttctgcccgctttgggctataccctgactctaccagccggcagatatcccctaaaacggcaccggcttcaaccgatgccaattggtccctatctccgaggaaaatcactctagcctgcggtggcagtgccgcaatcaattttgccatcataggtaaatcaaccatcgatgcttcgtctaccaccaatacatccaaattcaacggatttccccggtgaaagcgtaaacgttggctattgggttgagcgccaagcaggcgatgtatcgttgaggcctgatcgggaaacagctttctttcgttttcactgagcggcagagcgctactggccttacctaatgattccgttaatcgcgcggcagctttcccggtcggggcagccaattgaatacgcaatcttttcacttcattcaattgcaccagcgccgttaacagcttggccaccgtagtcgtttttccggtgcctggcccgccggaaatcaccgaaattcggcgagtcacggcaacagccgcagccaccttctgccaatcgatttcactcgatgacgaaccaaacaggttatccagaatccctcgtaaccgtttctcatcgattggttcattcacttcatcacgggcaataaaatctgctacatcgccctcactctgccacatacgctgcaaatagaggcgttcctgctgtaatactaaaggcgtaggtaaagagccatcactgattgcatccgaattttctaacgcagcctgcaaatctgcagcatccggttcgccggcagcttgccataacgcatgagccaaatcgggctggcgcccgcaaaacagtcgttccggatgcaatctatctaaaggcaggcaaacgtgcccggctccggtttcagcgcttaaatatgctgctactaactggattaaaggagaattatcagtggcaatcatccgtgcaaactgaacgtctaacgggcgcaatagtttgtcgctaaccgcctgttccagcagcgttatcatactgactctccttctacgttcacggattccccgctaaataggcgatccattccttcaaccaaggcgatatccggccgacagtcaaaaacgccgtttccgggtttttggctgtcggcaccacgtaaaaagagataaatcacgccgccaaagtgccgctgatactcatagtcgggtaaacgatggcgcaaataacgatgcagagccaaggtatagagctgatactgcaaatcatagcgatgttcagccatagcctgttccatcgcctctctggtataggcgctgctatcttcccccagccagtttgatttgtagtccaacagataatatttaccctgccagcaaaataccagatcgataaaaccttttagcattccttgaacctgctggaaatccagcttggggcaacgggcggacagagggtcatagtacctgaccaaagcatccagttcatttggctgcaataaacgctcgataggtaggtaaaactgcagctctgcttgcttctccttcggtgataaatggctcaatgtcacgcctgtattgtttaacggcgtagtgaggatatcggtaatccattgatacaaaaccggttgccattcatcccctagcccctgctgctgtagttgctcagctaaccaggcttcgtcgaggggctgactgaagtccaaaggttccagtaaatcatgtaaaaaggttccaggcgcagcgcctcgcgggaaggtatgagccgtcaaacccgcttcttccgtaggcccttgttctccagcagcgtcggtgtccagcttcggtaatagctcctgaggtaacacatcgtctgccggaatactgatatttttggacgagccgtgttgttgtaaccccgaataactggttacacgccagttatcgaacattctgcgggagaaggtacgaccagccagctcgggcataggttcgttttgctgctgccactgacgatcatccagccgttcgaccacggtgaccgcaatatcctcatcggataattcagccagtttttcagccaggtaaacggcgtctcctgcctgcgcagcttgaaccaggtaaccgagagcactgagatgcatatcactctccccctgttttttccggccacctttaatgaggggagcaatacctatgctacagtgataaaccgagcgggtaagggcaacgtataacaggcgaagatcttcagctaaccgctcttcttcagccagttgcttactctcgtcactggcgttcaaatccagcagggcttcaaaattggttctatcgtggtacaacacatcctgttgctgcctgaaattgcccacaaaaggcaaccagaccaaggggtactccaatcctttcgacttatgaatggtgatgacctgcaccaaatggcgatcgctttcgagccttaactgttgattttccgattgatggttgggctgagcaatctgttgagccagccagcgaaccagaccatgctcactttctaactgcgattcttcttcctgcaataactcccccaaatgcaacacgtcagtcagccgccgctcaccaccagccgtagccagcagattttcagccaatcccctacgcgcaataagctcacgtagcatcggtaaaacaccacgtttttgccagtgttggcgatagcgatcaaactcctcaactaacgcatcccaagctttttcatcgtgattaagggcatctaacatctgcgcatccagccccagcaaactggtcgccatagcgctgcgtaatgccctttcttgctctggtgccaataccgcctgcaacaaccacaataaatccttggcttctggggtatcaaatacgctgtctcggttggacatatacaccgaaggaatagaaagcagacttaaggcatcacgtattaacgcagcttccgcgcggctacgcaccagaatagtgatatccgacgcttgtaccggacgcggcccatccggtgtctgtaaaatcgcctttccatgctgcccggcggttagccaatcacgaatctgcacggcacattggcgagacataagctgctgatattcactcacaccaacgccatcaccatgctgtaaccagaaatgcagtgcaggctgcgtaagaccctcaatctggaaatccaatacctggtttttctctgccgccgcaacttcaataaagggtatttgctcgaataaaaaaggcgctttaactcggctaaataagcggtttaccgaacgaaccatcggaaaagatgaacgccagttggtttccaacgtgtagtgagcattaacctcagagcgagcacgaatataggtaaagatatccgcaccacggaatgcatagatcgcctgtttgggatcgccgataagcaacagaccgcaatctttctggcggccatacagcgtattgaagatgcggtattgttgaggatcggtgtcctgaaattcatcaatcattgcaacgggataacgctgccggatagcgtcagacaacatttcaccgcccggctgctgtaaagcagcatccaaacggctgagaagatcgtcaaaaccgagctctgcccgctgccgtttctcctgctgaacactcattcgaatttcgctgatagctcgagccaaaatcaggtctcgcagcgttaagggttgttcaaacaaaacgtcaatcgcggtaaatagtggatgttcaggaaccgcaccttttttggttttttcaaacaaaactgtctggcgaaacttctctaattctttgggcaagagatagtctagggtttcctgctcggcccatagcccaactttctcaagccaattggggagatgtttactgctgtaactacgcttatcaacccctgattcgctaatcaaagcagccagttcatgggcgctttgacgccagaattcttttaactcatcgatcttcgtgatgacctgctgatgacggctgagaatcgtttcgtcatccccaggagtttgtcgcagcttaggcgcctccccctgtaaatatgcagataaatctttgagtaacgcttctggtccactccattcctgactcactaccgtggcaacagccaaaggcaatggataacagtgacgacgccaaaaatcggcacaggcctgccgccgcagcggtaattcatcctgaatcagtttttgttcgaacagaatcccggattcaaatgcgttattagccagcatcctctgacaaaaaccatgaatggtataaatcgcggcttcatccatttgccgctcggccgcgagtagatacgccgcagcagcgggtaaatccgtgatctctgccaataacgcccgatgcgcgggattactactctgccctcgcacacaggcgatacgtaattcatgaatattgttacggattctccccctcaactcctcggtcgctgcttcggtaaaggttaccaccaagattttctctacggtcagcgggcgtgggtaagcggagcttccccccaatccgagtaacaatcgtaaatagagcaatccgatagtaaaagttttacccgtaccggccgacgcttcaatcaggcgttcgccataaagcggtaaagtcagcggttcaaggcgttggggagaatttgtcatcatggcaccaatactttccgtggcagagtttgctgtaacgaggacacgttgggataagttttccaccctttaggcgcagcataactccccacatcctttccgttacctttaacctgagaaagcaacgcaagcccctgaggtttaatcactgcctgctggaaatagtcagctagctcggcgttattaattagccgaacctgagcgatcaatttatctcgagtatcaaaagcaaaattatttcgattaaagtcattactgaagcggctggcttcttcacccaacgtctgcgggcgttgcagcagttggttaatcagtccctgcttatactgctcgaaatctgctggtttcatatcccgcaaacgcttctcagcctgaggatagaaagcctgatagcgttgatagaggtacttaggttgcttgctattactttgcagcaagaaacctattccccattgacgccctaccgacatcgggaaggcaaagacggcatagcctaactgctcctcggtacgcaaccggtcgtagaaccacggttgaatgatttgccccaacaggttgctgtaagccatgcttttgatttcatcatagccagtaggaatatataccgcagccagagccgcatcagtgctactaccaattcgttgtaaattggccagctgcaccttatcaacgattacgtcttcgttggtccaccaatttgtgccaatgcaacccagctggtttttcagggcttcagctaactcgctaacctgtttaggtgccatattcccgatagccaggatttcaaccgcagactccttaagtaaactatcacggtaagcgatcacgtcctgcactgtgatcgtatcgaggagcttacttctttcactacgctcggtataaggcacgcgagaaagcatttttatcggctgaatcgccagttcaaatgcttttcctttatccgcaatagccagctgttcgcgataccaggatttagcctgcgccaactgctcttctgtcggagtgaagctggagtaccctacgactaaagaggtcaatagctgaggtaaacgctgagtaaaaccattggcattgacgtataaaccattgtccggcccggtcgagaagctaatgccaccgatagatgcctgatagctcaattgatcgagagaaagtgaagccagatagtctgtcagagcgaacaatacctgatgacgagcatcgtccagcgcatgttgattacggaatgcgagagagatatccgctttaggttcatcggcaaaatactggctaggcatatagaacacccgtaaacctggctgatcgacgattttctctggtcgggtcatttttttatcgacttcaaccaaagaaaaattatcaggaatataaggatttagcgtcggtaaagagagcgcgactttttgttctaaattttgccactctttcaactgctgcggcgtgattttgttcacctgataaggtgcatcaacaaagtaagccgttttgttatgtggttcatcagggctgatgtaccagattcgggcattttccggcgtcatttccgccaatcgtgctgcaatggctttaggatcaaaacgatcggccagataaggcgcatcaagcgtatgctcgaccggtactcgcagcatcatatccaccagccactcaatataatccatatcccgagtgatagatggataacggaaatccaggttcaatacatgtgcaatttcatcaaagtagcttttattaatgccttctttggccaacattttcagatattcaaaaatagccgcaacgactaaatctcgctgtgccagccctttatctgtcaaggatactgagattgaaaatactccaccgttgcgatcaaccataggatcggcccctgcgttgatcgagtcggcaagcccctgcttttgtagccaatcagataaggtgtttttgctacggttaccaatcagataactaatataagtatctgtcttgcttcgaaattcggcactattgttgtcgatgcgaaaatcaattttcagctgcttacgcggctgtgcgggaacatagtgaatgatgatgccggtttgctcagcggtaaccacaggtacggtgataggtggaaccttggcatcatgattaggaatacgaccaaacgtatctgccgctaactgagccagcttatccagaggctggttactataaattacgccaaccatcaggtttgcggaataataacgcttataaaaatctaacagttcatcgtgcaactttccgtcaggcttatctctcagcgtctccaaatttccaccggaaaaacgagcgctagggtgagccggattgagcgtttctgcgttaacttgcccaatgcgcataccgtcacgagaacgggccatagtcagttcggcattgaccgcgttacgctcacgatcggcattaatcggatccagcagaggctcggcaatagcatcggccaaacgttcgagcgcaggtgctaaggcgtcattttccacttccagataaaatgctgtgcgataagaagccgtgctggcattgtggctaccaccgtgttttttcaggaattccgaaagatttcccggttcagggaatcgcttcgaccccataagaaccatatgttcaaggtaatgagctaaccccaactgattatcaggatcttccagcgtgccaacaggcagcgccaaagcagccaaagacttaggcgcatcctggtcagaaaccaaaagtaccgtcataccgtcagccagttttattgcctgatatttgcgttgatcgtgttggcttttatgaatggtttccgctaatggttgccaacctgtcgaagcccagctaaccggcatccacaaccataataagaaaattacaccggcgatacgggtaagctgtttgtgcattcctttctcccatgaccctaaaaatatggcaccagaattttgtcgcgtttgttgagtaccaaacgtttggcacctagtttttccacaggctgatactcatcagcaaatctcaaaaaatgtaatatttaggacaataaaacaatcagttagcaaaaggtgaacagctaaataaaaagttcgaatactattgccatttactcttcaccgcccaattgttgttaaactcgattgtgctgcgcaacaggtaataagtaacgttccgtttcttgtaaaatcatcgccagacgagcgctgtccatgtggcggaaaactcgttgaatgtaaggatcttctccctctccagctatttgctgagatccctgccaagccaataaaagcttgttgcgggctttttcctgcgtgtcttcatcccacagaatttgtccagactccgcattaaaacactgactgagccaagcccagccacttttgctcaaaagcaataatggtcggctcattcctttttggtaaccctcgagtaatatctgcagattagcctgagcctcacaggcctccagaggcccaaaacgccatgcggttccttttcgaccatacattcggctttcgccctttccgcccgctgcacagtaaaccacgtgttcaacccaaagaagcaacccatccactgcggttagagccgctggccgccagcgaactaatccatcggcttgcacctgatgtatccagccggtgatagacatgttttccacagtgatatttaattcaaggctatatgtctcgcagcgctcctctctgacttgctcggcaagcaaggccatttcttcgagctgaccgcgccagtaaatctcgccaaatgccccgaaaggaagatcgccactcgctcgcgctctagcaaaaactttatcaacatctgactgctctactaatgcattcaataactgagtatttagttgataacggctgagattatccagcgtgaatggctcttcgtctggtaattccgtctcttcgatcacgaagttaacccccaaacgacgctggaaaaaggctcgaatcgggtgacgataaaagctggttaagtcatccagtagcagttcttgtactggctccggcgagagcggctgattaaaatcaggatgagccttcccctttgcgcctgcagcaggcaaccattccaccgcatagctttgcatttcactaccctgaataaagttctctatcgcgaagggtactcgcgcatgccagttttgtaagtgatcaataacctgttgtgcgctttcatccacgctaacagactcatcgccgggaagatggaaactctgaccgatatattcgatcaattcactcaccagtaccgacggatagcgcagactattatcctgaatcgaacgcccgatatagctgatatacagacgctgttgtgctgacagtagagcctcgaggaacagatagcggtcgtcgtcccgacggctgcgatctccacgctgaatttgtttagccatcaaatcaaagcccaacgggggcagagtgcgcgggtagacaccgtcgttcattcccaacaagcaaaccactttgaatgggattgagcgcatcggcatcaatgtgcagaagtttattggccctgccaggaaccgctgactgattctctcgttatccaaccgagaagccagttcttctcgcagtaaagtcaggggaacacattcaggatactgggcgctaatgccataaccgatcacttttaaccattgctgctcaatcagagcaagcaccgcttcagtttcattatcctgttcaaaaaaggtatcgagcagttggcgacatagcggcgaccattccgccagcgttcgcgcctcactcaattgctgcctccaacgactcagttgcatcagcatttcggctaattgcccaactatttctgccgccagaccactggcttcatcatatggcagaacatcatgccaatcgccggcctcactgctcatcgcgtaacccaataacatgcgagtcaatccaaagcgccaggtatgctgccccgtagccggtaacgataattcgcggacattatcatcatccagcccccaacgaatgccggattcaccgacccactggcgtaagcgtcgcagcccgtgttcatcaataccaaatttgttagctagggctggaacttccagtagcgccaatacctgctcggaggtaaaacggctttgaggcaggtccagcaaggtaatgaaagcctgcagcgcaggatgtgcctgactggctttccgatctgagatagcaaaaggcaggtaacgatcggcagaaacattaccaaaaaccgcctgaatataaggcgtatagctatctatatccgcaaccatcacaatgatatctcttggcgtcaaactgggatcttcctccagcatggccaagagttgatcctgtaagacctcgacttctctttgtgggctgtgacagatatgcaggcagatagaacgatcagacggatccaaaagacgttttttatcgctggaggctaacgtttctggggttgtaccaataacggcgtgatcttctagctccagcatatcgtgttgaatcgcgtgcagcagattatcaggctcaatatcgacaaaagcatgtacctcttgaatctcatcgacctgagataacaaatacatatggtcgcgccccaagcgtccccaagaagccaaaagagggttacttagctcttgctccccttcctcgttaaacagtagtgcagcattctccggctcacggaataggcttaactccagtttttcgcgataatgtcgacgtttacggctctgcaactttgccagaaaagcgtaattctggatatcgccccaaaaatagcggcaaggattggtgaacatcaggtgaatatcaatatgtttacctaaggcttgcaacgccgacaggtagattggtggtaatgcagaaataccacagataaagactcgtttaggcaaacccggagggcaaacgtcggtttcaagtaaggtgcgaataaaccgttgataaagattggcacgatgccattctggctgctgaagctgacgtgtatattcggttaaagctttccaaagcggagcctgccattcctgagcctcgtccagaccgtcgactctaagcccttgctcccaagcctccagccacttgggtcgatataccaaatattggtcaaacaggtcagcgacccgcgccgctagctgataaatttttcgtttatcgccatcgtcactcaggtagcgctgtagcgacgaaaagacgggttcgtttagtaaatcgggaagtagccacatcagtttccaagtcatggcatctttgctgaaggcgctttctttcggtatgccaggtaataccttagtaaacatatcccagatgaatgttgcgggcagcgggaactcgatattagccgcaatgctaaactgttgtgccaattgcatctgtagccattgcgccattccggggctttgcaccaaaataacttccggctcaaagggattatccaacggatctctttctatcaatgccgtagtcagcgttttgagtaaatctaattgattagaatgataaaccgtgaacatcgcgactcccaaatggcgcatataatctataggtcaatcgggtcattcctgatgaattccctctagtacccaatactctagcctgacatagcctaatgtaacaggttataaacctataagagattcataaccccttacttccccgataacagtaaagccgataaagctcgactcgctgtcgcagcggcgtaaggatctcaacgtttaacctctcgcacaagtcatcaacccgcgtaatcacactgttatgttgccagcctgtacgttgccagcctgtcttcggtggccacgtcattgactctgcaagttccctggtcataaaagactcggtttcatactgagctaaaagccacgcctgttttccatgccattcccgataaaaaccctgcaacaatatttggtgatattgcaatactccgagtaaggaaactgacaataacaaaaccgctatcatgacctcaggtaagctcaaaccctgctgactgttttgattgatgaaccgcctctccatggtcttatttttcctgctagaaattgctattagcctgagcaaaattccctctccttttccgggcaaaaatctagccaaccctgagcgataccaacaatatgatgtccctccggcgaaacttgcgcgttgtctggagcaactcgctgataaagatctattttgtgcccgtggcggttcccccccccttctccccttaatacgaagatatttggtgtaacactcgctttaatacaaaccctcaatgcttctgaaagatgctcctgacagtgccacaatcttttactctgccgggggggggctacctgatgcaaaggccatctctggcttattccccagctcagggcggaaatcgccaggttatagctacgcaggtaatgttgctcattacgactcatcagtagcagattatctaactgcctatgcatggcctgaagcaacaagaggctcagagcaaaaacgaaagtcatcgtcatcagtatggcgctaccgttctgcgaagattttctcataggttgtaacctcggactctacgctgcaactcttgccgtatctgcgttcgcttccctacctgcccagataagttaagggttaagagatttccccttaacggaatatattctcgttgtacgtcaaagccagtgacaaaaacttctgttgcatcaaataacctttcccacccactactttgacaatccgtttccccgcgagcactttccagctgatttttacgtagtcgatagccaaaatactcggaatgcttatgccttatcccctcccactgaccgtttcgattcaggtcgtaagccacaatgacgcaagaattggctttctctcctgaatactgccccagaaacaaccgcttcccttgacagaacccattgcagaacccggctcggcgcagatctttttcaatgattgagagaacccgttgcattgataattcaagccgataatgctgataaactgccgtcagccgctggcgtagttgcggataaatattcacactgcttaaaaccatcatgctgccaaatatcaaggcaaccatcacctccggcaggctgaatccgtcagggaaacaacaaccgaaacatcggcttcttttcgttcgaaggttagggtcagtgactaacatagtggtatccgaaactgagcatgtttctctccgcacaatctgattcgtccatgattcgaaataactaaccgaatacgacctgccgcattagccagaataattcgccccggttgcgcagtgttccttaggccataaaatccaaggctctcaggcgttaactcaaccaaagtaatacctgagtaatcgggcgtgaataaccatccatcctgcgcctgacacccttgtaatggctgctccccgctaccaatacaccaggtatcatcgaagctgtgccagagcaatgccggcctattcaaccaaaaagcgtcagcctgcaagcgagttaagaaacctagtaactgccgagcggttatctctagcctctcccgctgctgataatggctccaatgttgaaaactgctgactgagatgtaagcaagcagagccagcaccagtagccattcaatcaggctaaacccgcgttgtttcatacatacatgagttttcatccggcgagtttaaggaaatcaccaaatgaagccagaggtagaatgagaagtctggagaggctccgcaacctctttaacggtggtgtaatggcggctgtcaatctgcgtagcaacacgcatttctaaactgaaaatgaaaataagaaggtctggggagaaataaaaaaacggagccgtttggctccgctctgttctgagactcatttattaaacaagtcagttatagctgttgtattgacggttaaatagctattggagctttaatccccggatacggatcgtagccttcaatttcaaaatcttcaaagcgatagtcaaacagcgactcaggtttacgcttgatcaccagcttcggcaaagcacgcggctcccggctcagttgcaaatgagtttgttctatatgattgctgtacaggtgagtatccccgcccgtccagacaaaatcgccgacttccagctcgcactgttgcgccatcatatgcaccaacagcgcgtaactggcaatattaaacggcaaaccgaggaatacatcgcaagaacgctgatacagctggcacgaaagcttgccatcggccacgtagaactggaagaaagcatggcacggtgccagcgccatttgatccagctcgccaacgttccaggcagaaacaatgatacggcgtgagtccggatcttgttttagctgctccacaactttactcaattgatcgatttggcggccgtctgccgctccccacgcccgccattgcttaccgtataccgggcctaaatcaccgttttcgtccgcccattcatcccagatagaaacgttattatccttcaggtaaccaatgttggtatccccgttcaggaaccatagcagttcatgaataatggaacgcaaatggcaacgcttggtggtgaccagcgggaagccttcctgcaaattgaaacgcatctgatgcccgaaaaccgacagagtaccggttcccgtacggtcagcttttggggtgccctcatcaagcacttttttcatcaaatccagatactgtttcatgtcacctcacgaaagttgttgctgaggacggcggtacgcccaaatcatcataataataccggccacaatcattggcacagacaaaatctgccccatgctgattacaccgtcgaacaggccaagctgcgcatctggctggcggaaacattccaccacaatacggaagaagccataaccaatcaggaatagccccgacacgctgcccattgggcgcggtttgcggataaacagattcaggataataaataggactacaccttccagaatcatttcatatagctgagacggatggcgtggcaacactccatactggaacagaatgctttgtaactgaggatcggtcgctgccagcgcaatatcttcactacgtgaggttgggaacaacatcgcccacggagtatccgtggttactcgtccccagagttcgccgttaataaagttacctaagcgaccggcacctaaaccgaatggaatcagtggcgctataaaatcggaaacctggaagaaatggcgttttgtgcgatgggcaaaccacaacatgacgcagataacgccgaccagcccaccgtggaacgacatgccgccatcccagactttaaacaggtaaagcgggttatcaataaacatcggcaggttataaaacaggacatagcctaaacgtccgccgacgaacacgccgacaaaaccagcatacaataaattctctacttcatctctggtccagccgctgccaggcttgtttgcacggcgaaccgccaaccacatggcaaaaacgaagcccaccaaatacattaaaccgtaccaatggagagacaccggcccgatggagaaaatgatcggatcaatattaggaaacgccagatagctgttgctcatctatcaccacaatatgtctaggattttccccaaattgggggctgcagggagcgcatgatagcataggcaggcgacattcaggggaacggcaaagggaaaagttctgtaaacaatgacggcgaatattcccgccgccctctgactgctcagctattttccgcctcgaatcagcccgcctaaaccgcggcgttccataaatgcggcagttaaatgacgcacatcggtggtcatttgcgccgtcaatacacgctctgccaaagcttccgcttcggccagatcaacattacgcagcaggtatttaattcgcgccacgctgcgcccattcatactcaaatgacgatagcctagacctatcagcagtaaagcgcccataggatctccggccatttcaccgcataaactgacctgtaaaccggaatcggtcgcctgcaccagtatttgccgcagcacttgcagcatagccggatgcaaactgtcatacagcgaagcaactcgcgtattattccgatcaaccgccaacagatattgtgttaagtcattggtcccaaccgaaataaaatccacccgagatttcaggtacggcaacataaagatcatcgccggtacttcgatcatcacgccaaggcgcggctttggtaattcataccccagcgcttcttccacttcccgtccggctcgatcgatcaagcgcttcgcttcatccacctcttccagactggtgatcattggcagcaaaatccccagattgccggtaccggcattggcccgtagcatcgcccgtacctgaatcagaaagatctccggctgatccagcgtgatccttatccctcgccagcccagacacggattttcctcgcttatcggcatataaggcagctgtttgtcagcaccgatatccagcgttctaagtgtgaccggtttttgcggataaagctgtaacatgccctgatactgggccacctgctcttcttcggaaggaaagccgctctggagcataaaaggaatttcggtacgatacaggccgacgccatcgacgcgcccgccgagcagttgctcatgttccggacttaaacccgcattgagcagcacctgaatacgttcgccacttttcagctcagcgggttgctcaacatcgtcttcggccagcttgctcagctcgatttcttcgttaaccagacgctggtattcctgcaccagcaccggctctggatccaccagaatctcgccgcgatagccatcaacaatcaataatctttggcttaatagggaaggctgaatatccgcacccattacggtaggaatacccatggcgcgcaccagaatcgccgcgtgcgaatttgctgcaccatcgcgcaccactacgcccaccagacgatcctgaggaacttcagccaacaaagtggcggttaattcatcagcgaccagaataaaacgctcaggccactggctcgcgccggaggtgctgtcatcgagatggaagagtaaacgctgccccagagcacgcagatcgccggctctttcacgcatataagtgtcttgcaggctggcaaactgagcagcaaactgctccacaacttgcttgaccgcccattccgcaacggaaccggcgtcaatttcagcaaacaactcccgcttcaggcgagcgtcgtttaataagtgggagtaaaggtcaaaaatagccgcactttctttctgggaactagcggcaaaacgcttactgaaacgacgaaactcggccgccgcttcttccaatgcctgagttaagcgttcacgctcacgcgcgctatccaaggttgaggctttgtaaacctgatccagtgaaggctgggtagtgtcctgccaaccttctgcaaccgccacgcccggtgcggcagccagtgcccgaatgcgagtttgacgatattgaccaaaaatagcgttgagctgagattgagacagaatggccgccaactgtgtggccagcgtgaccataaatgattcttcgctttcatcgaattgacgatgttctcgctgctgcaccaccagcacgccgagcaattgccgacgataaataatgggaacaccgagaaaagcgcggaagctatcttctttaacctgcgggacatacttaaaactggggtgactttgcgcatcagccaggttgatcggttcggccagtcgcccgaccaatcccaccacaccttcatcaaaagccagcgtaatagtgcgaccccgaggctttttcaaacctcgggtcgccattaggtaataacaacgacggtcattatctgccagataaatcgagcaaacttccgtgttcatcgccagacaggtttcattgaccaacagctctaacgcatccgtcaggctggctgccatcgcaactttctctacgacttctcgtaaacgcgtgagcatgattggataacttaacctcttttccggcgataagcgggtggtgtccgcggcggagtcacctcctgcatcggcatcactgtagcagcaaattccttcatcacgcggcggtagacatcccgtttgaatgacaccacctgacgaaccggataccagtagcttacccagcgccaaccatcaaattctggcgtgctgctgcgctgcatattgatatcggcatcgttacacattaactgcagtaaaaaccatctctgcttttggccgatgcaaaccggctttgtatcccaacgcaccaaacgtttcggtaatttataacgcagccagttacgggttgaagccagtattcggacgtcctttttattcagtccaacttcttcaaacagttcgcggtacatcgcctgttccggcgtttcgccagggttgattcctccttgaggaaactgccaagagtgctgaccgtaacgtctggcccacaacacctgcccctgcctattacaaattacaatacccacgttcgggcggtagccatcatcatcgatcaccggactacctcgataagcttaatactcaaagatgctctgattgtttcacactaccaacaggcggtaaaccactgcttatcagtgattgaaacaccatgaccttgggataactcacagatattggcaaagttataaacaccctcggccaggctcggctaattttattcactttttctgtggatatatgtgtgcagaactcaggggtaagacgggtacaactcattttaagtaaattatagacgaataacaaaaaacaaattaaatcatatttttcatcaaattaagttatgcacagggtataagtaaagtgcaaaaatgtgatctgtatccgtttatgatccttggctgattaaagatccaccaatgcggtttttatccacagataatgcggctaagttacacaaaaaatggctaaactcgcaaaaaaaccctgcgtcaaggctgtaaattgaaccagtattcatgtttcaaccaggttatcccacaaatctgtggataaataggtgtaagatcctgttcattgttgctggcagctagtgtacaaatcgatgaaaacaaaatcacagcccggtttaagtgctaaaaaatcactgttaaatcatgctattattaattttcattcacagcgataattaaagttcgctgcggtgtattaaagcagtgcattttttaacccatcctgatgagttttttcactatgtcggtttattcacaacccccagcaccaccggtagacgaacaacagctcgtggatcgcgctcaggcgctggcaggcttcacgctaggagagcttgccgcccgggctaactggcctattcctgcgaatctaaagcgtgataaggggtgggttggtatgctattggagttttatttaggtgccagcgctggcagtaagcccgaacaggattttgcagatattggcatcgagctaaaaacgatcccaatcagtgcgcaaggtaaaccgttagaaacgacatttgtgtgcgtcgcgcccttaaccggaaatagcggcgtaacctgggaaagtagccatgttcgtcataaactggcgcgagttttatggattccggttgaaggtgaacgacaaattccactcgccgaacgtcacatcggcgcgccactgttgtggagcccaaacgcagaagaagaagagctgctgcgccgcgattgggaagaattaatggatctgattgtgttaggtaaggtggaaagtatcactgcccgccacggtgaagtattgcaattgcgtcccaaagcggcgaatagccgagccttaaccgaagctatcggcgaaaaaggccagccaattctgacgttgccgcgcgggttttacctaaagaaaaccttcaccgcgcccttgctggctcggcatttcctgctttagagattgttctgagccgtactgaggttatgatccattaataacagcgtataattacattcttgtattttttaaggtgtgtaaacgcaatgtttgaatggattgccgatccaaatgcctggctggcactgggcacgttgacgattctggaaattgttctgggtattgacaatattattttcctttctctagtcgtagcaaaattacctaaagcccaacaaaacaaagctcgtcgcattgggctggccggtgccatgctaatgcgtttggcattactggcctctatcgcctgggttattcgcctgactaatccattatttacggtgatggaacatggggtttccgcgcgggatctgattttgttactcggtggactcttcctgatttggaaagccagtaaagaaatccacgaaacggtagaaggcagcaataacgatcatcagagcaatgtcagcacgttctttggtgccatcgtacaaatcatgctgttggatattatcttcagcctggattctgttattaccgctgtgggactttccgatcatctctttattatgatggcggcggtggttatttccgtgggcgtgatgatgtttgccgccagacctattggcgaatttgttaaccgtcatccttccgtcaaaatgctggcactggcattcctgattttagtggggttcaccctgatgctggaaagcgttcaaatccacattccgaaaggctacatttacttcgccatgttcttctctatgggcgttgaaacgctgaacctgctgcgcagcaaaaagaataaaaccaataatatttaaacctaatttctgcgggtgcaaccttatgcgcccgcatcactcttttttgctcacattcatctcatgcccttcccccgtatctacggcttcgatatagtcggataaggccgttttattttcgcctggtaatttcggacattaaggaaggtcggcaatgcaatatcaccgtatcccccacagttctttagaagtaagcctgctgggtctgggcaccatgacctttggtgagcaaaacagcgaagccgatgcccacgctcaactggattacgccatctcggcaggtgttaacctaatcgataccgccgagatgtacccagtaccgcccaaacctgaaactcagggactgaccgagcaatatataggtagctggcttaaagcccgcggttgtcgcgaaaaagtgatcctggcaagcaaggtttctggcccgtcacgtggaaacgatcaacccattcgccctgcgatggcattggatcgcaaaaatatccgcattgcgctagatgccagccttaaacgcctcaataccgattatctcgatctctatcaattacattggccacagcgggaaaccaactgctttggcaaactgaattaccgctacgcgcaggaaaccgccacggtcacactgctagaaacgctggaggcactggcagaacaagtccgcgcaggtaaaatccgctatatcggcgtgtctaatgaaaccccttggggtgtgatgcgctatctgcaattagcagaaaagcacgacctgccgcgaatcgtttctatccaaaacccttacagtttgttaaatcgcagctttgaggtaggtctggctgaaatcagtcagcacgaaggtgtagagttactggcttactccagcctggcattcggcacgcttagcggtaagtatctgaacggcgccaaaccacctcaggcacgtaatacgctatttagccgctttactcgctactcttcgccgcaggcacagttagccatagccgaatacgtggcgctggctaaaaaacacggactggacccagctcaaatggcgttggcttttgttcgtcaacaaccgtttgtcgccagcacgctgcttggtgcaaccacgttgccacagttgaaaagcaatctggatagcctgcatctgattctggatgaagaagttttgcaaggtctggaagaaattcacactcgttatactttccccgcaccttaactgtagcagtggtcgctaaatgcaaaaaggccgtcacattggacggccttttctatataaaattatataattatatcagcgtcgtttttgccaccactgccatacccacagtgacgctatagccaaagcgaagatgacaccgaacccaatgcctacggccaccaccggtgcacccagtttgattaccagagaatacagcgccagcatcaataacatcgcggtattttcacctaaattctgtaccgcaatggcattgcctgcgcccacgctgtgttttccacgctcttgcagcaatgcattaagaggaaccacaaagaagccgccgagaatcccgatcgtcaccagtaataaataagccatcggcatactctgttgcaaagagaatgccgctaccgcaacgccgatcaaaaccccggcaggcatacagcgtctgaccgttttcagtgtaacaaagcgcgctgccgccgctgcgccgatcacaatccccaccgctaccgttgcgttaaggatcgtcggcgtcgcgttatcaatgatccccaatgccaccggaacccaaagtaccagtagaaaacgcaaagtgactcccgccccccaaaaaaggctggttccgaccagcgagaaacgcgtttccccatctcgccacagcgtcttacaagcggcaaaaaagcgacgactcatcactgtcggacgccaagattgtccacgacgggcggcggaaagacgaggaataaacaggttagcgaccaccgcagcggcgtaaaccagcgcacacacgcctaaagcgatactcagattccagtccgctaacattcctccagccaccgagccaatcaaaattgcggcaatggttgaagcctccattaaaccgttggctttcaccaattgatcgccggaagtaatttctcccaggataccgtatttagctggtgaataagccgcagcaccaatcccaaccaagctataaccgaagaacggattcaagccaaaacagatggctaacgcccccgctaatttcagagcattagcggtcatcatgactcgtcctttggcaaaactatcggcgaactgaccgacaaagggtgccaaaatgatataagtcgcgacaaaggccatttgtaaaatcggctggctccaatcgggataaagctgctgcttaatcactgccaacgtaacgaataacagcgcgttatcaccaaaggccgaaaaaaactgcgccgccaaaacggccatcattccgcgagataataatggcttatcatctgttgccccgtgctgggtcatgcttccatctccgggtgctccgccattttagccagagtgacaaaatcgggtttaccgctgcctagtaacggcaaagctttcaacgggcgaatatcgcgcggaacggctaactctggaacgccactttcccgcgccgcggcggataaacgttcacgcgtcatattgctatccgttgtgaacaacaccaatgcctctcctttcccactatcggattttgccgcagccgcgtgttgataatcaggagaaacccgcagtgccagctgttcaacgctttccagagacaccatttcccctgctagcttagcaaaacgtttcattcggccacgaatagtgcaaaatcctttttcatctattgagacgatatcaccggtgtcataccaaccgttctgtagctctccatcagcattttccgctaccggtggctccagcacatcaggtttttcaacgcgcagataacctttcataatatttgggccgcgcaattgcaagcggccaccctgttcaattccaggaactttgatcaatcgagcttccatcgtcggcaaaattcgcccaaccgtaccgactttagccgccattggcacattaatcgccaccaccggcgcgcattccgttacgccgtagccttcaaggatgcgaataccgaatttatcctgccaaatctgtttggttccttccgccaatttctctgcgccagcaaccacatagcgcaagcgggcgaaatcataaggatgagcaaaacgagcgtaattaccaagaaaagtcgaagtaccaaacaacacggtacagtttcgatcatagaccagttctggcacgacccgataatgcagcgggctaggatagagaaatacccgactaccagtcattaatggcgtgaataatccaaccgttagaccaaaagcgtggaacaacggcaatgacgacataaagcgatctcgaggcgtaaaatcagcaatagtgcgaatttgctcgacgttggcaagtaaacttccgtgagaatgcacaacacctttgggatggccttccgaacctgaagtgaacagaatcagcgctgcatcttccgctttctgagccaccatagcgcgacgagggagaaagagatggaatagaatccagagtttatccgtcagactaaccgtatcctttaaatcctccagatagacccaatgggcctcgctcacctgttcaggtaaatgagttagcttccctttctcaaggaactggcgcgacgtcacaatggttttcaggctggccgcagtcatggcacttttcagccctttagcgccggaagtgtaattaagtaaagccggaatacgcccactcagtgaagcaccgaaaatagccgcggcggtaatagttgcgttaggcaaaagcataccgactcgctcacccgattcggtaaaacgttgtaatatccggctcactcccaaggatttctttaataacgtctgataactatcttctttaaaagcgatatcttcgatacacggcttatggcgaccataacgatctctggcagacagcaaagcttcgaacagcgtttcacgtgggattatagccatacgtgccgccatcataatctcatgaagcttttctcctgccagtattcggcgttctttggctctgggtgcctcaggcatcggtaattgggttgctggcaggacgtaaatactgattttggggaaccattgaagctttaatatcccccccaggcggccaaagtgactcaactcaggcccctctaaacgcacgggaataactgtcgcacctgatttcgccgcaataaaggccgcaccatcataaatcttcatcaatgaaccggtcacggtaatccggccttctgggaaaatgacgacgggttttccctgctcgaccattcttactaactgcttgatcgacataggttttgctggatctagtggtacgaaatctacgtaagactttagccaacgcatataccaactttccgtcacgctggaatacacggcaaacacaggttttatcggtaagaacaacgccaataatattccatcgagaaatgaaacatgattgggagtaatcagaattttttgatgggagaactgatcgccgataccttcaatggtgacgcgaaacagtcgacgaaaaagggcgcgcagtaagcggagaatcatatccatttctctatcagtcgatgagtcagataaatgcagaatactataatcacagcatttattccgctaaccaacgtaagagaatctgcatggaaaaaagaataaaaaaaaaacctacgtatctacgtaggtcggtgtaaataaaaaactggctctaacacacagcgtatgttgattactcaccaattaatacctctgggatatcaactgtaccgacttaacccaaagctcagccagcaaataatcgcaatatttacgcgcaaagtgtaaccagcaatgaactttgtcagaaacaagatatatgctgttaattcatgtaactacggccatatttaaggctgaagttaccggcttctcatcaactgtatccctgccaattgcgccattattataacgctctgacctccaccaaacagctcattgcatttgggccctgcgttagtggtgacgttcctatatccaaagttaatacattcgggtttccagactgctctatctgatgccgctgttggccaaaaccgggatcaaaccaggctccagtcgccatcaaaacgacgcctctcgtcacaccgtccgtaatgctcacaccggccagacaactgccgcgagcgttgctaaccagcacttccataccttcggtaatagttcgtgtagcggcatcatctggatgcataaataaggtttcgtgtccggcagttttgtttgattgcgccagcggcgcgggatcaagctggctgtgtagccgatccgctggctggattgagatcaaatgcaatggccatttttcagcatcgacactgcccaaccactctaccggcggtttccattcagcgtgaggaccaaaatcttcatattgatagcccgcaattttctcactgaacaattctattttaccgctgggtgtctgtaagggatgcgcctgaggattcgaacggaactcatcgaagaaaacgaactctttctgcggggcaggcaagccaacatagccctgccgccagaaatcctcaaagtccggccattccacgccttcggcacgctgcgctacaccgcactgttgatagatatgcgcgatccacgccatttcatcccgattttcagtgaaagcttcccgataacctaaacgttcggctaaatcagcaaaaacatcaaaatcgtttcgcgcctgatgctgcggagctatcgcctgatgcatggctaaaacataacgatcgcgcgaggaaccaccaatatcattgcgttccagagagctggtgatgggtagcacgatatccgccattttagccgctggcgtccaccagatatcctgcacaataacggtatctggcttttgccaccctttcactagccgattcagttgctgatgatgatggaaagggtttcctcccgcccagtgcactaagtgtatatcggggtaggtatgggtttccccttgaaatgagtaactctgccccggttgaagcagcatatcgcaaattctggcaaccggaattgccagcccggacggatttttacccaccgacatagtcggtgccggtgtatctatacgcgggttcccaacgccattcattgagccgtgcccgaaagaaaatccgccgccgggtaagccgatttgccccaacatcgccgatagcgcaatcatcatccagtaaggttgctcacctcgatgagcgcgctggatggaataagaacaagtgataaaactacgtacaccaatcaattgcagtgcaagttttgcaatgcgatcggcaggaataccagtaatctggctggcccactccggagttttggctacaccgtcatgagtgccgcgaatatactccgccaactgctggtagccaacgcagtgactaagaaggaaagccttgtcttcagcaccacggcgctgaatttcataggccagccccagcatcagcgcgacatcagtattcggacgaatgggtatccattccgcatttacgaattccgggcaatcatcacgcatagggctgatattcacgaccggagtgccttttctcaccagtttttccagccagggcttgagagagtgctccgcagcaccaccggatgatacctgcgcattttttaacgctaaaccgccaaaagcgataaaaatctcgcagtgttccaccacacttggccaggaagtcactcgtccagtcagtgggctaaacgttccaatgacgtagggcaggaaaaactgagccgcaccccaactgtaattacccatttggtcaacgccgccaccgccgctaaagtaaaaacgccgaactagcgaacgagcgtggtgtactcgccctgcggaagaccagccataagaaccggtaaataggccagacgggccatattgctctctgactcggcggttttcttccgcaaccagatccagcgcaacatcccaatctacctcaacgaaatcttcccgcccgcgtaaggtacgatcgcttccctctcgtttctgcaaccatgaacggcgtaccgccggttttcggatgcgtttatcggaataaaccataggtacgatagagtttaatagcggcgaaggatcgggatcttctacaaaaggttcacaacgaatgagttttccgtcttcaaccacggcggtataagcgccccaatgagcaagctgcgggtaacgagtaatggtcatggcgctctcatatagatcagtaaaatagataaacctgcagatgaaaataccttcgccagctagctagttcaacgaactaattaagctaaacaagttctattttgcctaaccttccggtactcaccttaagtcgcaatagaaaatgctctcttttccgttttatttggttttatctggccaagttgcgatctctcccccttgcgagaagcatttttttccgcaaaactgaaggatgtaagcgattaccctaaaagtttatggaaaagaaatggccactattaaggatgttgccaaactggcaggcgtgtctgttgctacagtttcacgcgtaatcaaccaatcccccaaagccagtgaaagttcccgcgcggcggttttaagcgcaatggaacagctacagtatcacccaaatgccaatgccagagctcttgcacaacaatcaacagaaaccgttggcctcatcgtttccgatgtttcggaccccttttttggtgcaatggtcaaggctgttgagcaaattgcctatgccacagggaatttcctgctaattggtaacggttaccataatgccgataaagaacggcaagccattgagcagttgattcgccatcgctgtgccgcattagtagtacatgcgaaaaagctgcccgatgaagagcttgtttcattgatgaaacaaattcccggaatggttttaatcaatcggacactggcaggatatgaaacacgctgtgtcgctcttgacgatcgttacggtgcctggctggcaacccgtcaccttattcagcaaggtcataaacgcattggaattatctgttcaaaccaccagatttcagacgctattgaccgtcttcagggctatctggatgcgctaaacgagcatgatattcccgtggatgaaaaactgatcgcttatggcacaccagatgaactgggcggcgagcaggcaatgaccgagttattaggtcgcggcaagcaaatcactgcaataacctgctacaacgattcaatggccgctggtgctttatcagtacttagcgataacagcattgatgtaccacaggaaatctctcttattggttttgatgatgttctgatctctcgttatttacgccctcgccttaccactattcgctacccggtagttgcgatggcaactcaggcagcagagctggctttggctctggctaaccagaccccactccctgaaatcaccaacatgttcagcccaacgctggttcgtcggcactcggtgaccaatccgccaaatcgtacagaacatacggagtaacctgcacttatccctattatgttaaactgcgcgccctggatatcagactggctaagaggttagtgcttaatgattactatgctagatgtctctatacgtgctggcgtttcaaaagcgacggtttctcgcgtattaaacggcactgggcaagtgaaagaaagcacccgggctgcggttttcaaagcaatggacgaacttggctatcgccctaactttttagcccaatctttagcgaatagaagctcaaacagcattggcctggtggtttccaattttaacggcccttactttggtcgcctgctacatcaagcagccacgctcaccgaagccagcggcaaacacctgatcgtaactgatggccacgatacaccagaaggagagcgtcaagccgtccggctgttggcagacaggcgctgtgacgccatcattctctatacgcgttttatggctgaggctgacctgatggcgttacttaccagcctacccactccgcttatggtggttaatcgcgatttacctcaagcgcgtgagaggtgtgtattctttgagcagcaacaggccgcttttaacgccgttagttatctgatccagcagggtcacagagatattgcctgtatcactggccctattaatacgccgactgcgctatcccgtctgtctggttatcgtcaggcactggccgttcatgatattccttgtaatgattcgctggttgttcagggcgacagcaacgtggccagcggctattccgcctgtcatgaattactgcatcataatcggcatttcaccgctctttttgccagcaatgacgatatggcaataggtgctatgaaagcacttaatcaagctggaaagaaaatgccccaagatgtatcgctattcggttttgacgatgaacccagcgcagcctatctgcagccggcgctgtccaccgtatacctgcctattgacgcgatgatcgaggctgcgataactcaagctttaaaattaatcgatggcaaaagcgttaatcccttatcacctttcatcggcgagttaaaaattcgcgaatctgtctctcccggcccctataaaccctaagttactgttagacaaaaccgctcgccataccttattcgccaagatgcgaggcgtttcgcattctttatcctgacatttcccttgggataaaaaatgcttcattctgctttaaaacttggccaacctcatatttcacaggacgagaatggaggtattaatgtttaaaatcattggattgagaaatacaaagcggctaactcacattcgtgacggagaatacctgagcaatttaaggctctatcatcaacagcgcgggtattcaaaaatatcagggcagaatcatgcagggaaagggagtgggggtttgcaacgcaaggctcagaccgccaacggcagcctaagcatcagtcttcgccaatctttaaagcatttccaaggcaaccagttcttcgatagtttggcggcggcgaatcaatctcggtttcccattttcaaacaaaacttctggcagcaatgggcgactgttgtaattggaagacatcgacgcaccatatgccccggtatcatggaacaccaaataatcacctattacagcccgggccaaagctctggtttccagcccaccgccagcttgctgagtaaatacgtcaccagattcacacaatggtccggcaatcaccgaatcaatcaaaggctcattggtaatatctctgccatcggcaggtaataacgaaatatggtgataactaccgtacatggcgggtcgcatcagatcgttaaaaccagcatcgactaatacataatgacggctacccatattttttaccgccctaacctgtgcaaccagaacgcctgattcagcaacaagaaaacggccaggctcaatctcaaggctaattgggtggcctaaatgttcagcgatttgctgtctggctttattccataggccgtaataatgttcggtatcgataatatcctccccatattggtagggaatggataagcccccgccggcagatatcgcgctgatatcctgatccaattcgattacctgacgtaccatagcagcacagacttgttccaaatgttgataatcaacaccagaaccaatatgcatatgaatgccaaccagctttaacgagtatttttggatttcggctatcgccgcaggcagatcttgatgccagataccgtgtttgctgttctctccaccggtattagttttctgactgtgcccgtggccaaatccggggtttacccggagccatacgggatgccccggtgcatgctcaccaagctgagttagcatatcaattgatccagcgttaaccggtatatctaactcgacaacacgcagcagagtcgtctgatccaataaatcagcggtaaatacaatctctgcaggctcttggcccggctgaaaaccggctaacaaagctctttcaatttcccctaatgaaacggagtcgaccttaacaccctgctcacgcattaaacgtagaatatgaatattcgaacacgctttctgcgcaaagcgtatcacatcaaaattacgcaactgattgatacgttgtgcaataatatctccgtcataagcccaaaccgggcatccgaagcgcgcaggtaatgccagcaggttttcggcattcagggcggaggaagtatcagtcagagagagcggcatagggtttccttttgggtaaatctattctgattaatttattggctaactcattattagtcattcactttggcattcaaaatatctatttacgcacagtctattcatttatgatatagcatgaatgcgttgaaacagatcaaatcgccggtgcacaggagcgaataatgcccgctatttcattacgacaaatagagatttttcatggtgttatgacaactggcaatttgacggaggccgcagctctcttacaaacctcacagccaacggtaagccgcgaactggctcgttttgaacagttaattcaacttaagctttttgatcgtgtacgcggtcggctctacccaacggcgcaaggattaagacttttcgaagaggtacagcgctcttattacggtttagaccgcattgtgcaagccgcggacagtattcgccagttccaacaggcgcagctctcaattgcctgtttacccgttttttcacaatcactactaccggcggtgtgtaagccttttatcgatcgttacccggaagtgagcttgaatgtaataccgcaggaatcgccgttgttggaagaatggttatcggctcaacatcatgatttaggtctgaccgaaaatacacaaacgcctgcgggaacccaacgatatacattaatgacgctcaatgaggtttgcgttttgcctgcggaccatccattgcaaagcaaaaaggtgttaacaccgcaggatttcaacggtgagaattttatcagcctgtcggtaaccgatagctaccgacaattgctggataatttgtttaatgaagaaggaattagtcgccgtttagtgatggaaacccacagcgcagcatcagtttgttcaatggtacgagaaggcgtcggcgtgtctatcgtgaatccgcttaccgcactcgattatgcggcaagccatcatgggcaaggcgtttgcgtgcgcccctttagcgtcgaggttcctttcacggttagtctagttcggccattgcaccgcccctcttccgaattagtcgacacttttattgctcatctaaaacagcaggtaacacgctttaagacacgtctgaccaacgtcattacccgctaacttggttaacaccagcgagtcgcgaacgccggaaagtataaaggcacaagaacagcccaagcagtgcaagcaatgcagcagctaaaggcactgcatttaatcctaagccttgtgcaataaccacaccgccgacccaggcacctaatgcgttacccacgttaaaagcagcaatattcagagtagaaaccagattaggtgcttttttcccataagcgacaacgttgatttgtaacgctggcacggcagaaaatgccgccgcagaccataagaacaaagtcagttctgctgctagcaatgaataactgctccagctaaataaggcagagaatacggcaatcagcaaaaaggtcatggtcaaactcactgacaagcgccagtctgctaaacgaccaccaacgatattcccaagagttaaacctaatcccatcagtaatagcgtccaactgacgccagaggcggaaaccttggttacctcagtcaataacggtgcgatataagtgaacagagcaaacatagaggcggcgaataacactgtcatcatcagtgaaagccaaattcccgccccgcgcaacgcagcgatttctttgcataaatccgtaggtatttcatctttagaatcagggagtttggcatatagggcgaacaatgataacagcccaatcgcggccacaacccagaaagtcgattgccagccaaatgcctgccccaacgctgttcccagcggtacgcccaacacattagccagcgttagtccggtgaacattaatgctaccgcggaagcccggcgattaggcggcaccaaattggccgctacgacggcaccaataccgaagaaagcaccgtgacataacgcagtaataatgcgagccagcatcaaaaaatcgtagctgaacgctaaagcgcacataacgttgccaattataaaaataaccattagcaacaatagcgtctttttacgcggcaattttgccgttagtaccgccataataggcgcgccaatggctacgcccagagcataaccactaattaaccacccagctgttggtatagaaatatgtaaatcaccggccacctccggtaataaccccataataacaaactcggtcgtacctatagcaaaagcacttaacgccagtgccagtagcgaaacaggcatacaaaaactcccagtcaaaaatatccctcagccgttacgcggacggattaacaatgtaaagatcttatgctcggcctaaaaaaccgacgggttattgagtcgaaaagaatgacagaataagtgggagcgagtgtaggctcatcaatataaccttataaatttcaagtatttattttctcatcctgcgaaacagaagtaacatgaatgcaaatagaaaaaccagagttaagcgaaatcaatcaggtttgaaaaagagatcctaggttaactatatgaagatagtaataacgctttcctctgaacctgaatataaatatgttcgagaaggttactaactcgattcatttcatcatgccttgccattgttcactggtcgcaaaccactcaattaagaagtccagcagagttcttagcgttgtaggcatctgtcgccgcgaagtataaataccataaatgcccatcgcctgaggttggtaatctggcaatagctggactaaatcaccagcgataatatgtggcatagccgaataactgggctgaagagtaattcctacgccttccaaagctccgctgagcaggacaaccgactcattagcgctcaggttgccgctaaccggtaccgaagatttaatcccctcctgatcgaaatgccacaaacttttgccaaaataagaataggtcagacaattgtgcagagccaaatcctggggagtctggggaattcccttatttttcagataggaaggagcagcacagactacggaataacaggtagaaagcggacgagcaattaaattaggatctaattcattggtgatgcggatggccagatctattcgttcctcaaccaaattgatagcgcggttattcatctgtaaatcaatagcaacctgagggtaacgctgcaaaaatgccgcgacagcaatgcctagcgcagtttgagctaaggattgggaacaactgatcctgagtaatccacgcaatacatcgctttcgcccccatcaaccagatccatttcattagccaaagccagcattttccggcaacgctccagagtggtttctcccgcgtgagttaaactaagtttacgcgttgtccgatgcaataatctggcaccagcccattgctccatctgcgccagatagcgtgtcaccatcgctcgggacatctctagcgcttctgcggcagcaatcatactgccccgatcgacgatggctacaaatacttcagcggccgttactctatccataattagtcctatttaagcaacaaacaattgctcattatccggtttttattgcgtgatatgcaatttattattattcccgtacccagcagctaacagccaataggatgactaatatgtttactaaaacccttttacagatgacttttgccagcattgcaactttcggggctatttccaccgccgttgcagcggaaccgctgaaaatggaagtgtataaccctggcgagaaaagtattttccctgtttcttctgaaattatcagtggaaaaactgaggttgtattgattgatgctcagttccaacgtaatgatgcagaagcactgattaagaaaatcaaagatagtggcaaaaagttgaccaccatttatatcagccaatctgatcctgatttctacttcggccttgatgtcatcaccaaagctttccctcaagcaaaagtgatcgcaacaccgcaaactatcgaagaaattaaagaaacaaaagacggtaaaattgcgtattggagcgggattctgaaagataatgcaccaaaaactgtcattgtacctcaaccgttagtaggcaatagcttcaccgttgacggtgaaaaaattagcgtagaaggtttagatggcccatcgccagagcgtactttcgtatggattccagcactgaaagccgttgtgggtggcgtggcggtttccggggatattcacctgtgggccgccgataatcaaactgtggaatctcgcgataattggttaaaaacactggatgcgattaaggcattaaaacccgttaccgtagtacctggtcatttcctgggtgatgcgccgcaaacattggaatcagtgaatttcacacaaaaatacctgacaacgctaaatgctgaaattccgaaagcaaaagattcagcggaattgatttcggcgatgaaaaaacattatccaaatcttaaagatgaatctagcttggaattaagtgcgaaggtgctgaaaggtgaaatgaaatggccacaataattgccatctatcagagctgcagcatttaaagcattcacgaggaaataaatatgtccggtaccacattacactacattttcgatccactgtgcggatggtgctacggcgccgccccactggtaaaagcggcgcaggccataccagggctttccatcagtttccacggaggtggaatgatgactggagaaaaccgccgtcagataaatgcagagtggcgtagttatgttatgcctcacgaccagcgcatttcaggactgaccggacagccatttggcgatcgctatttcgatgggttgctgaaagatacttcagccatactagattcggctccaccaattaccgctattcttacggcagaaataatcgcagaacgcggtttagatatgttgcaccgtattcagcacgcacattattttgaaggtcgtcggatcgcagatacgccagtgttgatcgagttagctacagaactaggtttagatgtacagtcatttagcccagtatttcaggaaaccttaagcacggcgacggctcagcatattgctaatagcagagcttttttggctaaggtacatggccaaggtttcccgacctttattctacaaaatgaaaagggcgaaatgcagattattaatgctggacaatatcttggagatccagcgggatggactcagatgttaaatgaagctataccttagagatattacgagtctggttgattcatttattttgacaatcaaccagacaacttatttttgcgcaactttaagaatatagaataattttttggtaaaacgcatatcactttttacccgccccataacccactgtttaaatcgccacttatatacgaaaaaaaaatcatacaatctataaatataaaagaaagattcaggtttttttgcagttaatattattgactcgttccaatagtcttgccgttcccaaaggatgaccttgggattgctccataataaccgtattacaatccaacaagaaaaatagaggataacttattacataaggcgctttgagtaaattatttagctcttcatcattgctctcttcaggaaccatagagactacttttccattaaagatattcatcttgatatctaaaactctaaacaacatttcccgattaactttaaagcttgcatgatcatcataaatatcagcagaggtagtaatctcacgacccaaaatggtaactctggcattaagatggtactggtctaatggtgttttaattaactggtttacttcccaatacccctctatttctctcatgggattgaagtaggcatacagaaaaccaaagctactaccaataatcccacccaaaaatgcagatagaacacaaaaaccaattattttcttgtacataaaaactcaccgtccactcgcccacaaacgttatagcttccgtcactattttttttcaacataaggttaggatgcttacgataaagctttaaaaaatccgcgtctttcttttcatccagattaataagtataggcaaatcctgatactttactttgaagatgttaatctggtattcattaaagaagaaaacaaatgaaaaataaaaagccgcgctaaaagaaagtacaacaagcaataactgtgttaactggaaaggctttcttacattacgagaaattaattgagcgtcgtcattaattacctctagcactgtaggagttaattcattttcatcagcgttataaaatacccgtttaggctccaaacctaaacaatatcctttttttggtatagtaataattaattcatgttttttatcatttagcgcattgcgcaggttactgatagtttgcgtcaaggtattgtccgtaacatagctatcagtccagattgtcttttctatttgctcacgagagacagggtctggataattatcacacaatagagcaagaacttcggactctttatttctaagttttacctcattcccatcgtgttcaaccgctctaatcttaggggtaaaagtgatatctccaataaaaatcctatccattagtcctccgtttcaacatccatgccgctttgtcggcctgcttggacctgtcccatagcaatagaagtttcagtatggcattgaaataactacacaacccctaaaaatatcaatccatgaatgttctaacaaaaaatcaataaactataaaacaccacataagcgcaaaattcaatatagaaatccgaaaaatagatttttacatcatatatcacacaaaaacatcggcgattctcatgtaagtatcctcgcttcagttccacattctttttgaaatttccagtttatcggccatcagccggtatgcttttggtgtcagattatccggggatgcatggggccgctcaatgttatattcagccagcgatccgtcatttcccgtgcttcattcaacgttctaaataggcaaaatccagtatttcggtccagtacgtcttgttaaaacgtaaaacatccgataaacgcgttcagtgtcggcttacccggtttgatgaattctagccgcacaccatgggtcttcagcccattgtgcaaagccagtgatatcagttccaacccattatccatccgcatcttcagcggatatccacggttttcctctatcctgtccagctcgcggacagcacgctgcgcttggatagtcaggtcaatttcgatagccagagctgcacggttaacatcatcctttaccttgaagcgccgaaaacgtcgatcgcacaccaactcgtcgtgcataaaatcgatagacccgctctgattgagtactcccggcgtggcagcggagtcggattacgataacatagcggggatagcgctcagcattccagactcagatctgcaaccatctgtttcagaagatgattttatcctcaagatctttcatctttttcatatcagaggctcgcatcccaacttgcttggctctccagttgtagtctgaggcttcagaaaccccagctgcgcggcaggcatccttaacggtgcgtccggcttcgacggacttcagaacggcaatgctctggtgctcagtgaatcgggctttttgcatggtgaacgcctaaaaagacataattaatatgtcggtagatctttagaagtaaatggttcgttttgatggaatagggacagatccaaaggctgctcaatttctcccgtcagatatttatgagccaacattaaacagctacgaatatcagcaacgataccaagaatccgcgaaaacatttcatggattgaacacccggaattataatttgaaggagagatagttgaagagttttccaattcgccttctctttcagagagattaaatagtaatactaaagaatcgtgaacacttattgatgaacaccgaatcccaggggtgaactctatcaaacaagggctattccttcagacgtatctgaagacgaacaagccgaacgaaggaaacgctcaaatgtaggccataatgtaacaggaataatggctcgcaggtttgaatcctaacgtcagggtgaaatatatacaatcataagattaacaagtgagatagtcacaattgtgctggcagacagttttgacagtgaacaagatatataattgatagcatcaggggccaacccagcctatatcccgacaccaacagcaaatgatgccattcgagatgcaggtaccactggtgtcggcgttttggccaaatatcttaagcaaaaagtggcaagagcgttgatctcaaaagttatctcgcccccctcagctattgttaaagaaaaataggttttacttttaaaaaagaacgtttaattaagagctaactaatcgagattgcctacagctatagcgtcggctatcttatatttactcttgagaaaaaaccaacaacaactattaccaacagtttgttaaactcaatatcacagacaataatttattattgtaaacagaaaaaatcatgctttcggaatataaaaattctgaatatgagcaaagcctcaaactcatttaacaatcggcgcaaatgctatctatttttaattatagttccgcatctcacccccttaattcataccttttttgtattagcgtagctcgaccactttgaattttatacaatgtaatcaacttataattcccaacgtcattatctagcttaataatagacattagatatttatgttctatggatagcatatcacggaaatatgaagataactcatttctgatagtagagttaattccagtgaataacaggtttataaattcatcgactcctacccaacctccatccggtttactttttattacgttgattatgttatcttttggcaccttggagagtaacaatatgaatataagttcaacatggctttcatttatggagtttatatttatatggactttatcatcaggtaaataacagactctatttttatcaaaatttttaattttatgttccacattatttcgccccagaatatctataagatattttgagctttcttcccaaactttctcgtcaacgccaagttttttagctatatagtctaatttctccctatctatcttagctttgtatctcaaagtataaaatgcgtttatattaaaacactctgtaatagaaataattgataaatttaatgcagtaccacccactattattttttcattcacaatcaatacttcatcactctcagcactcatatttatttttttcatagcaatgccttgcacacttaataaccattccttttctttatttatctccaacactcttttgtgaaaataaaagaatctactccaaacatcattcaccttcatcaaggctgaactcataagagaaattataattaaaacaaagatcagtgaaatacctgattgtttcttaattaacatttaatcactgccattcatcatgattattttattaatttcaccatacttatccagatctataataatttcaattgccatcggatgtttactaaattcattccagtaatcttgccatttaccttttgagaaaaacctaaactttatgcttttcactcctgttaatattcgttcttttatcacttcacctgatctctgaggataaaataacgcatcatcaacattaattgcgcgaattctctctaaacttttattattaatcttatatcctactttttccaactgatagtaataaccgacactatttacattaagtttattattcctcactatttcaatagtattggatacacctcctgatttaccaacaaagaaatcgataggaccattattagtgatctcttttggcgttcttactatcgcatgagttaaatcattctctatgatataaatagaatttcttatatcttcaagttcatctaaatgactgatcacatttgacgtcgttctcaatgtcacttgcaatacctggtacatggctaaactcaatagtgaaaagatactgattgccaaaatcacttctataaaggtgaagccattgttatatttcagaatcaatttatcaccctgtaatatttaaaatgtaagggagtatccatattattttcaattttcacttcaatatctattaacatcaaaccaaaatattcaacatcttcacttctggcgcgccactgccattttttctcgatcatatattcatcaccagagatccaatcattaccaggaggattgcgattaagtatcatttcatttaatttattttctgctattaacacagaaaatatatcactcttaacctggttatttaagtatatgctttgcgtcataaattgaagtatagcaagacctgtagtggaaaatataattaaggagaacataacttcaagtagagtcatccctttacttttttttattattacatctgaaatattcatgttcttgttatatttaaagaatagttattataatcaataacactcactccgtatttatcatacagatttattgacaaacttgattctggtaataatgggtaaaggatgaaataaaaaaaatgatgttctgagtttgcatctccccattcatcatacccagtcaacacaactttcatatctaacactgaattgccaaaatctctttttaatgcttttcttccataatatacttgctcccaggatttatctggccaaaacttgctctttgctattttattgtccccgttacattcttttaaacatagtttttctacagcccatccctttacatttattctaataatgtacacagtctgctcaaacttccctagttttcttatccaatctatagtggtatataaatgctcggcctcagtaatagcatcttttttatcatcctttattttaaaaatagctattacagacatggaggataaaataaaaattaccaacattatttctagcaatgtaaaaccataaaacctagttttgcgttccgctatctgcatgctcatttagccaattacctatatcatcgctagtgccgatttcaccatcaggacctttagataaaacatctatactgttataaaaaccaggattttttattatataactattaccccatggatctttcggcaacctacgtaaataaccaccagaccgaaaattctttggtaaaggctcttctaacggcatttccactaatgacttaattccttgctcctcggaagggaataatccattatccagcctatacatatctaaagcattttcaaacgtagcgatatcagtaataactttttgtatatcagccttacttttgtttcccataagattaggtatcgttaaactcgccagcaaacccaaaatgacgataactatcatgacctctagcaaggtaaatcctttgtaatatctactttttttacacataatcttttaaccgccccaaaataaattaagccatattgttaagtaacaatattggctgtaaaacagataaaacaataaatagaattaatgaagccattatgatgatgagtgtcggctcaaatatactcattgagatctctatgattcgttcaaattcctcatctataatatctgccgttttttctaacatgatatttaaatcaccgcttttctcgcctgaataaatcatatgtctggctaatggaggaaaaatattggtatgactcaatgcagccgaaagactcgctcctttttctaccaatgatactccctgtttcatttctagtttaattgattcgttagttaaaactgtcaaaccaattttcatcgattgcatcaaaggaatcccactagagcacagtatagccagcattcttatatagcgtgaagcatgtatctttttaatcactttacctataactacaatttcaagtaactttctatgaacatagaatttatattttaacttcctcataccaaaaacattaatcattaaaaaaatgacaatggatatcattaataatgaaaaataactgctcataaagtcacttatcgacattaaaaccctagttgatagagggagattttgtttcatgaaaacaaactgttctatgacttctgggattaccgcagtgagtaagaccgaaataactgcaaaagacactaatataagcatgacaggatagactaatgcctgaatgaatttatttttcttaagatgtgacttctcaatattatcagccaaccgtttcaggataagatctaactttccggatgattcaccagattttatcaatgctcggtacaacacgttaaaatctcgtggaaatgattccagagaatcagataatgagtagccagagataatattatttcttatcttttctaaagtgatagatactgattttcgttcagtttgctgcgatacggctaataatgcctcatcaactgggatggatgccgaagttaaaatggcaagttgtctcgttaaaaccaacagttctcttttattaattgttttcttgattcttccataccagtttataacattaactttttttatatttaagagtgttaatccacgagcacgtactagctctcttgcccctcggatactttccgcttcaacttgccccttacaccttgagccttttttatttatggcagaatatttaaatatgatcatcaatattctcccgagtgactcgaatcacttcctctaatgtagtcattccttgtgttattttaactatcccactattctttattcccactgttatttttcttgcgagtttctctaactcaatctcactacctcgtcgataaatacagttccttatactttcatccacaataagtaactcatgaatagccgttctccctctataaccaataaaattgcattgttcacacccaacggctttaaaaccggaaattaagccattatttgcctcatgcaaatcagaaaattgaaactggtgagggctacggcagtaaacacaaagttttcgtaccaaacgttgagaaatgaccgccagcaatgagcttgccaacataaaggtttcgatccccatatcttgcaaacgagttactgcgccagtggcggtattggtgtgcagcgttgagagtaccaggtggccggttaatgaagcctgagtcgctatcttagccgtttctgtgtctcgtatttcgccaataagaataacatcagggtcctgccgtaaaatggcacgtaatcctttagcgaagctcatatccactttaggactaacttgcgtttgcgcgataccattaagatcaaattcgatcggatcttctattgtcataatattacgaacgctactatcaatttccattaacgcagcataaagtgtcgtacttttacccgaaccagttggccctaccaccaatatcattccatgaggttgctgcaataacttccttattaacttatagttaccgtcctccaccccaagagccttgagatctaacttcacactacttttatccaaaattcgcagtacaacccgctcaccgtggttagatggtaaagttgacaccctgacatccaacgctcgcccaccgactcttaccgcaattctcccatcctgcggcactctcttttccgcaatatctagtcttgccataacttttattcgggacaccagtaaggccgttagttccaccggcggttcaagaatctgatttagcatgccatcaattctgaatcttattagcaatctttgctcgaagggctcgatatgaatatcggacgcagcttgcttcactgcttcagacaaaacggcatttataaggcgaataattggcgcatcgtcggtcgtatccagtaagtcatcatcttttggcaattgttctatgagggtgctaagagctaattcattaccgatatccgtcattatttgatgggcttgctgggcatcattctggtagaaatcgaccaacctggattcaaactcctcatcggtaaccaaggccagtactacctttccagaagcaactctctgcccttcgagtaaatcatcaaacgacgctgaacaacggcaaactaaatgacaaccatgttccatagggataagtaatacgccatattttcttgcccaactaaatggcataggtttattaattatggttgtcgacagcgacttcaattaacaccccctctaccataaaaagagttaatatctttctttattaaatttattacctctttattatttatagtagacaatctacgaacatcactatattcattcaccttaacttctgaattgactaacaagcttctacttttttcatttttttcattgaaagctctaaacttatctgatgtttcatataaatattcatcagcctctcttattattgtaggcttaatgaacaaaattagatttctcttttctactctatctttattttgtctgaataatgcgccaatgataggaatatcaccaagtataggcactttgtttataacattcgtaattttcttgtctaataacccgccgacgacgactgtatccccacttttaaccagcacggcattattgacgattcttttattgaacgttgaacctatattatctttatctgcactagagttctctgccacacttgatacctcttggcggatctccagtaataccgtatcccctttatttatttgtggtttgacctttaaaataataccgactgactgacgagatatcgtgttataaaccttatctgtgggtgtcgtttgctgtgatgaaagaacaggtacttcttggccaacgctaaattcagcatccatattatccagtgttactatgctgggcgtagccagaatatcattacttgaatttgtagccagagcggtgaataaacccgcccaatttccacgataaaatcccgtcgccagcccgctcataccattcaccacagcactcatattcccttgagcactattggttatttttccagagtcaagcaaactaacaccaccaccgtgactgtttgcccattgaatcccaaggttcatgccttcaccatcctgagcttccacaataatggcttcaaccaggacctgagcacgcctaatatcgagcttagttataacctgctctaaatcatacataaccgtaggcgctgcactaataatcaatgcattagtctgattatcagctttaatcatgatttttttatttggggaaaaagcaggcactgattttttcttatcatcttttaggctagaacttacaccatttaacacatctagtaagttttcagccttggcatacttcaaataaatcacttttgtatttccatctgccgtctgttcctgatcaagtttccttattattgataccgtatttttacgagccccggcatctccatttatcaggattgaattagttctttcatcagcaacaagctttacttcctgcggcatttctttctttgacgagctgtttgctctcaaaagttcattgacgatccgtgcgatatccatcgcagatgcatgtttcagcttaaagacttctgctattgagtcactttcacgatcaaatttatcaataatagatattaatctattgaccactgcggctcttccagtgattagcaacgagttattcggttcgtaatgtacgatactgccagaatctgtattatcatttaattgccgtaataacggcgctatatttttagctgaaatatactttaacggcactattttattaataagctcatcaccattaaaaatatcatcctgcgtaataattactgatgctgagccttttgctcttttggcgggaactaccttcaatatattattcggcatctcaattacagtaaaaccatacacgtcaaggacgttaagaaaaaactgtcgatacttatcttcatccatattttcgtaactacgaattgaaattgtcccctttactttaggatccatgattatagttttatttaatatcctacttgccgagtttacgaactctctgatatcagcatcttccaaccttacagtgtaatcatttgcataagttacaaccgaaaatagctgtacagctatgatggcgacagacaagcacagtttgttttttatatttataaaaataataaaaaacaaaaaaaacggaaacttacttttttccacataaatagttcttataatagagagcggcattgcttacccctaagttatgagattatgaattgattacataacgccatctcttaaaatcattataaataattcactattcttactaactacaattccatcttcaattatttttaaaattttagtctcaccatcactaagaaaatcatttttaaaatacgttttatttatctgattacttgaaactatagccatagatgatgaattagaactggttattgttcctgtcaggcgtgaatccccatagtattttttaatgagtaaaaactcatcacgactcatattttcaacgtcaatatcatctaacttttttgtgtatgtagaaacagctttttctttttcaccaaatataccaatggcttttactctatctatatcgtaattaattttatccaacgatactttctgatctaacttaacctttctttcatcatttttatataaaataacaacgtcattgttggcatgagtttcgtcataaaaatcatttattaataaaaatgcattatatatacaaaaaattacgggtaaaaaaattgaaaacctgtgagaactacttaacaaaaaggtggcataacttaatttaataattttaagcattgaccacctttttccattaaaagtatgttacttaaatatagctgataagtgctaattatttttagcacttatctaactactaacttgagatcaacaatagccataaaaacgatcatcacaatgattatttcctgtagcacacagcaaacttgtatcaaggcgcaagccgtatctgttgatggttttaatgatatcggcaggaatctcaaattcagacagtaaggttctaaatttgtgaattaattgatggtaattattatctgaaatacctttatggttttcataccaaacaacctttataatatcttgctttctattcacatcattgaataagcacataaccaagcgtttttgcttttcattaatgttgatagttagctttctgttatgaaagtggattttattcatgcaacaatcaacggatacctcagaaccatagtcaatgatgccttttccgttaatgtcgataaacttactctcagtaactactgacacagtattaacatacatagataactccccaagtaaaataataaaaacaaaaaatacgtaaaatcataattatcaataaataataagtacggtaataattattgttatcatccgttagataaagcaaatcaaattatataaaaagatatatttttatatattatgttttccaaagcaatctttcacatagactcaaacgcacgcaagccactgaatacatgaaagaaaaatacaaaacaaagagcaatgatttttgaatgttaaattatcacagtcccttttcacatcgaaatcatactaattaatcattatgcatatccatataattacatttaatctttaagaaggtttaggccttactgttaaaagtacagataattactgcatttgaaaagaggaatttatcgaaataagtaacctatatataacagttaaacttaaacttataacagaataccatttaatatgagttatcattcattataccgctgaaataagtaattattatcatgtaactatagttcataagacatctttacttttataagaattatataattacatctaaattcactagctaatgaattatttatatctttgatgataattttgtattgaatacgaatatcacatcaaaatcagttaagttaagttaagttaagttaagttaagttaagttaagttaagttaagttaacacacaatacgaatccagactaaacaatcaaagaacacaaattaaaattaatagaattgattccaataagaatattttattaatgatgtttatatatttaatattgcgtgaacatttaatttattattatctatagttcaacacacactatataaaattattaataaaatagaaatttttatttttaacatcgatgtggataatattaagttcaatttactacatgctgttacattgtaagaaaaaactattacttcacaaagtgaaactccaattaaataaaattacgacataagtttatcaattaaaaacggagaccaacgctaaccaacttaaggttagtgataataatacattagcatagccaactcgcaagaatagcttatttgctttactgaaaaccattaaatttaaacatcctctcatagaccgaacccgctattttttatttaattaatcaatccttactcaaaaattcaataaaattaaaattaaaaagttgggtgtaatatgtaatagacgtggctttatcgtgttcggtagttagtgaatttatagttttttttgcattacagcatttagaaaatggcctaaaaaaataaactctatcaaggcactataaagcaagctgaaaagccagctcagaaattggaagtatatacatacaatattgatgaggtagcgacccagcgtaataaaaatgaacttaagccaaaggataggcttagccgcggctggatacgttttacaatgaaaattgaccgcatccactgtgaacacgatgctaactgctatgcggtgagtaaagaaggtaggatgggatttattttcgcccaacgatacattgcccgcacaatacaaagttagatgattttcaatggctcaaataatttgatgctgggaataccttagatacgtttacagcaaatacaaccatcagggacggtattgtgattgatgcttccgactttaaatataagtgttctcttctgacgctaaagcaatgcttggagcaagtattatgcccaagttaaacggcaactttctaaatttatagcggtttctagtttaagattatttttagattgttgtgcacacaacgagtgggctaatagcttatttaagcactaatcgccattttcccaataggatgatgatcgccgtcatacatagctatagcaatatttatgggctatacgctgaagaagttcttaggcgagcattgagttgtcttgcgcttcgttctattcatatcaagatccacgcgtagaaagcatggcatgtataaatttttaaggtgggaaatttatctgcggataactatgcgttttgcagacagaatctatgagtatcgactgatacaacgagggggaaaaatttaattcattgatataaatggatttattagaggttgggaaatattctgagacatgtttttggagcgggtgaagggaatcgaaccctcgtatgcagcttgggaagctgccgttctaccattgaactacacccgcgtctatgtgcgagtggcattataaccggttatgccttaggggcaaggaaagatatgctttaactgccggaattttaagctgttagcgttgttattttcttaactggcttatttgatagctgtaaaaaagggcgcctaagcgccctcatcgataaagttcgggattacttaaccggacgcatcgcagggaacagaatcacatcacgaatggtgtggctgttagtaaacaacataaccatacggtcgatcccaatgcccagaccagcggtcggcggcaagccgtgttccaacgcagtgacataatcttcgtcgtagaacattgcttcgtcatcgccttcatctttagcacgaacctgctccgcaaagcgctcggcctgatcttccgcatcatttaactctgagaaaccattaccgatttcacggccgccgataaagaattcgaaacggtcagtgatgaatggattatcatcattacggcgagccaatggcgaaacttctgctgggtattcagtgatgaaggttggctgaatcagatggctctctgcggtttcttcgaagatttcacactgaacacgccccagcccccagctcttctcgactttgattcccagagactcagcgatagcaacagctttatccatgtcgtccagatcggtaacgttggtttcaggacgatatttgcaaatcgcttctttcatggtcagtttggcaaatggtttgccaaaatcgaattcctgctcgccgtatttaacgacgctgctgcccaaaatggtttctgtcagcgtgcggaacagttcttcagtcagaacgatcagatctttgtaatccgcatacgccatatagagttccatcatggtgaactcaggattatgacgcggagaaacgccttcgttacggaagttacggttaatttcgaatacgcgctcaaaaccaccaacaaccaaacgtttcagatacagctcaggcgcaatacgcaggtacatgtcgatatctaacgcattatgatgagtgataaacggacgagcagatgcgccgccaggaatcacttgcatcatcggcgtttcaacttccataaagcctttttccaccatgaactggcggatgccggacattacctgagaacgcactttgaaagtattacgcgattcatcgttggcaatcagatccagatagcgctgacgatagcgagtttcctgatcggccaaaccgtggaatttgtcaggcaacggacgcagcgccttggttagcaagcgcagttcgctacagtggatagacagttccccagttttggttttgaacagcttaccgcgagcgccgagaatatcccccagatcccactttttaaactcttcgttgtaaacgccgtctgccaaatcgtcacgggaaacgtacagctggatacgaccgccgacgtcctgcaaggtaacaaaagaggctttacccatgatgcgacgagtcatcatgcggccagccacggtcacttctacgcccagcgcttctaattcttcgttatctttatcaccgtacgcagcatgcagttgatctgagaggttctcccgacgaaaatcgttcgggaaagcaatacccttctcacgtagtgcagccaatttttcacgacgcgcctgtaattcactattcagttcttgcacttgctcagcgacttgtggtttttgctctgacatttcagttcctcataacccggctttcaaacttgcctcaatgaatttatccaggtcgccatccagtacggcctgcgtattacgcgtttcaacgccggtgcgtaaatccttaatacgggaatcatccagtacataagaacggatttggctgccccagccgatgtcggatttgttgtcttccaacatctgtttatcagcatttttcttttgcatctcaaactcatacagcttggctttcagctgtttcatggcttgatctttgtttttatgctgagaacggtcgttctggcactgagtcacaatattggtcggaatatgggtaatacgtaccgcagactcagttttgtttacgtgctgaccaccggcaccggaagcacggtatacgtcaatacgcaaatctgccgggttaatttcgatatcaatatcgtcatcgacttccgggtagacaaaagcagagctgaaagaggtgtggcgacggccaccggaatcgaacggactcttacgcaccaggcgatgtacgccggtttcagtacgcaaccagccgaacgcgtattcaccgatgatcttgatggtggcagatttcaaacctgcgacgtcaccgtcagattcttcgatgatttcggttttaaagcctttggcttcagcccaacgcagatacattcgcagcaacatgctcgcccagtcctgcgcttcggtgccgcctgaaccggcttgcagatcgagataacagttggcgctgtcgtattcgccggagaacatacgacggaattccaactggcccagtttgccatcaaggatttccaactcggcaacggcttcgtcgaaagtctcttcatcgtcggcttcaatagccaattccagcaagccagaaacgtcttccaaaccttgagccaattggtcaatagtggtgacaatttcttctaatgcggaacgttctttacccaaggcttgcgcgcgctcgggctcattccaaacgtcaggctgctccagctcggcgtttacttcttccagtcgctctttctttgcatcatagtcaaagataccccctgataacggcggtccgttcggacagatcctggatacggttttttaccggattaatttcaaacatttttttgatgtcttaggttgagtcgttgatggcggaatgccattcgaaccgataattctaacggatctcaacgacggtttatagcaagttgaccgtatttatggcgctatctggacgaatcgcgccattagtcgcattttgcgaacttttaacattctgactaataaggccagaggtgctgaatcagcaattgaacgttgcggttaccgcggaattcattgatatccaacttataagccactttaacttcgcgcacgctgctatccggccataaagtggtatcaatattaaacgcgataccatccagcaacgggccaccgtttaacggttccagcatcactttcagatggcgttcccccaccagccgttgctgcaacagccggaattttccgtcgaaagtcggttcagggaaagcctgcccccaagggccgccgtcacgtaataattctgcggtttccagcgtcatttgcgcgccggtcagttcgccatcggaccagataaccccttcaagctgagaggcatccatccactcgcccaccaaatcggcaaaacgctgacggaactcgtcgaatttttgctgttccagcgataaacctgcggccatagcgtggccaccaaacttcagcatcaggccaggattgagcgtatccaggcgttccagcgcatcgcgcatatgtagccccgcgaccgaacgtcccgaaccttttagtattccttctcccgctggcgcgaaagcaatcaccgggcggtgaaaacgttctttgatacgcgaagcaagaatccctaccaccccctgatgccattcggcgtgatacatggcaatgccgtaaggcaactccgtgctggtacgttccagttggtcacaaagttgtaaagcctcaacctgcatgctttgttctatttcacgccgcgccaggttcaagctatccaaatccatcgccagtgcgcgcgcctgagcaatatcatcactcaaaagtagcgccacgccgatagacatatcatccagacgaccggcggcattcagccgagggccaagggaaaagcccaaatcgctggctgccagctggcgcgcatcacggtttgccacttccagtagcgctttgattccggggcggcattttcccgcccgaattcggctcaacccttggtgtaccaaaatacggttattggcatccagtggcaccacatcggcgaccgttcccaaagccaccaaatccagcaactccgctaaattaggaatcgccagcgctcgttgctcaaaccagccgctatcccgtaatcgcgcacgcaaagccagcatgaggtaaaaagtcacgccaacaccagccagcgatttcgatggaaaatcgcagcccaccagattggggttaataatggcttcggctgccggcaaaacgtcacccggcaagtggtgatcggtaaccagcaccttaatcccatgagcatgagccaaatcaacgcctgcatgggaagaaataccgttatctacggttacgataagatccgcaccgcgggcaataacctgttcaaccacttccgggctaaggccgtatccatcatcaaaacgatttggaaccagataatcgacgtggctgcagcccatactgcgcagagataacacggctaaggcggtgctggtcgcgccatcggcatcgaaatcaccgacaatcataatacgctggctatcggccaatgcctgctgcaacaaactgaccccggcatcaatgccgtccagctgttgataagccagcaggcctttcactccgcgctccagctcttgcgcccctttcacaccgcgagaggcgtacaaacgacgtagcaacggatgcaattgctccggcagcgcactctcatcggcaagttcgcgacgacgaagttgggtttttatagccactggcgatcaaccaccggttttcttggaagcctgatgcgctcgcagcatggcaagcatctcttttggcccctgatagcccggaacaatggtgccatcctgcaatacgatagccggagtaccctgaatgccgaattgcacccctagctgataatgtttagcaatatcggttttacaggttgccggggaaatagcatcacctttcatcgccgcatcaaaagatttattgcggttagcggtacaccagatagaacgcatgtctttttccgcctgagaactcagcccctgacgcgggaacgccagataacgcacggtaatacccagcgcgttatagtcactcatttcttcatgcagtttatggcagtacccgcaggtgatatcggtaaacacggtaatcacgtgtttttcctgcggcgctttgtagacaatcatttcaccgcttaatgcttccagttttttcagcagcaattgattagttacgttaaccggctgtgcgccactaacgtcatacagcgggccttgcagcagctgtttgccatcggcggaaatataaagcactccgctgtccgtcattaccgtgcttaaaccagcgataggggaaggctggatttcagcatttttaatatccagttttttcaatgtctgttggatagcagcatcatcggcatacgccaaaccagaaagcgaagccattaagattggcagcaacagtaaactttttttcattgaataatcctatttttcttctacagcgcaatcatgcgcgcggatggtgctgttgatgtagctgtttcaggcgttccgtcgctacatgagtataaatctgggtggtcgacaaatcgctatggcctaatagcatctgaaccacgcgtaaatccgccccgtggttcagtaaatgcgtcgcaaaagcgtgacgtaatacatggggggaaaggcgctcactatcgatacccgcaaggatcgcatagtgtttgatacgatgccagaaagtctgtcgagtcatttgctgactgcgattactggggaacaatacgtccagcgcctggccgttaatcaaccaaggccgcccatgttccatataattctcaatccagtaaaccgcttcttcaccaagcggtactaatcgctctttattccccttacctatgactcgcaccacgccctgccgcaaactgacatcactaatggttaatccgaccaattcagacacacgcaaaccggtggcgtacagcacctctagcatcgctttgtctctgagttccaaaggaatatcgacattcggtgagttcagcagtgcgtcaacctgcgcttcgcttaagtccttcggcaaacgttggggtaatttgggcgatgacaacagcgcggttgggtcatcttctcgcaatttttctctatataaatattggaaaaaccgacgcattgcgctcagcaaacgagccgaactggtagccttatagcctccctcaatgcgttccgccagaaaggactgcaaatccaaaggatcggcctgcagcaaatccttattgtggtggtgtaaccagccagccagcgcctgaagatccagacggtacgaagccagagtattttcggccagattacgttccagccacagggcatccaaaaactgttcaatcagcgggttattttgctgttgcatccagattcctctcatcgattgaactcagcatggcattatgcctgatgagggcacaaatctggtacactcgatgctattcctattcgttaatgctatggctacacaacatgaagattggtctcttttacggctccagcacctgttacaccgaaattgtggcagaaaaaattcgcgatattctcggtgaagatttgatcgatctgcacaatctgaaagacgcagaccctgcgctgatggaacagtattctgtgcttattctggggattcctacctgggatttcggcgaactacaggaagattgggaagcgatctggccacggttgagtcagttgaatctgcggggaaaaattgtcgccatgtacggtatgggcgatcaattcggctatagcgaatggttcctcgatgctttaggcatgttgcacgatcatattgccccactgggcgtacaatttatcggtttctggccgacagaagggttcgaatttaccagcccgaaaccattaagtgctgatggtaaacatttcgtcggcctggctctcgatgatgtcaatcaatatgaattaaccgaccaacgcgttgaacagtggtgtgagcaaattctgattgaaatggaatccttgctgtaatgccagctgcgggcgcaatggctgtgcccgcagcttcgaaccttctcgcggttatttccacagacggaaatgttcacttccggcgcagcctggcggtggaatttcatgacgttcgtcagcaggttttttagcaacccgtctctgcggatcggccaactgataccaatccagacgccgagtgagcaacatcactaccgccagcacgacaaacagcaaaccagatcctaataacaacgcgttatcttctgattgcagcaatccgtaaagtaccccatacagtaataataaactgcctgcaaacagtccgcctcgcagccaactacccagcaccgcgcctaaatacaccacaatcaacagactacaacttaggctggccaccagataagccaaggcaaaaccgatatgctccgacagtgctagtaacatcagatagaacagaattaacgctatgccaaccagtaaatactggattgggtgcaaacgcagtgacgtcaggctttcaaacaggaagaagctgataaacgtcaggccgataaacagaatcgcgtatttaatggctctttgagttaactgataatgattgaccggctcaatcaagctggtgctgaaagcgggtaacgcatcaaaatcaaacggcacttcatctgtagcaaaaatcacgttcagattattagcaaaccaggtgctgctccagtgagcctgaaaaccattcgcgccaacccgtcgttgattcggcaagaaatccccgaggaaattagggtgcggccagttactttccagcgtgagttcactactgcgccccaaaggtaccaaggacaagctgctggttcccattagtgtcagagtaaaatcaaccgtagtttccccttgctgtaaacgatgcaaatccagcatggcgtgaatcccctgactccccgcgcctaagtaagcaccgggctggaaatccatcgcatcgccgttgattttcagcggagacagtttctgaatccctcgcgcatcgctcaaacgcaccactaaaataggttttccaaacgtgattccgggtctgttgaggtaatccaggttttcactatcaaatttggcactgaagtgcagcggaccctgatagacctgagtacgataaatgccaagttgacgtacatctacgtccggcgatcccgttacggataaggtttccggcagtagataatggaaacggctaaccttttcctcgcgctttacgccttctttttcaacggtgaccatttcgctgtaaggcacaacgatcaacggaccaagaattttttgcgcgccactagtgctatcagtgactttgctaatcacgctgtaacggtagttgcttcgttcgctaatcacgctcatcagcatttctttgggaatcatcatcagtaagatcaatcccagcaacgtggttattttccagaacaatacggatttaaacataagtgaggctccttaacggtcatgaagccagaataagacgcggaagtgaaagcagaatgagcttgtgtgaagtgagtgtgaagttatgggttttcttgcatcagcggcaacatcatttccacgcgaaccccctgtggcaggcgattagccagccggatggtgccttgatgaataacggctacttcgcgcacaaaattcagccccagaccggtgcttttcgggccatcaggacgcggaagagaataaaaacgttcgaaaaccttttccttagcgtattcgggaataccacagccgctatcttcaataatgatatggtagttatttgcccgctgttcgccacacaaggtaatttcgccacctttcggggtaaaatccagtgcattatcaatcagattagtgagtgcctgactcaacattaaaccgtctcccgccagcacggcgcgatcgcaacgttgtaaaatcaaagctacacctcggctacctgcctgagcttctttaccagcaataacctgtttaagtagcgaatcaatgctaagcggttccaactgtaggtctacccgactttccagacgtgcctgtaccagcattttatccactagttgctgaatacgagcgctttgctgttcgatattcaataggaatcgctgtgccgtggccgccggaggtgcttcccgcaataactctgctgcgccgcaaatcgcagccagcgggctttttagttcatgagtcaacgtgtgaacgtattgctcaatataggccttgccatccaactttagccgcatactttctagcgcacgtgccaagccgcccagctcgctgctgcccattttgggcaacggcacggcttcgccctccgcaacccgctccgcgtaattaaccaatcgaccaattgagcggttgatccaccatacaaaacccaggccaatcaataacgcaatacccaacagaaccgcaccagccagaagtattcttcgttcactgcgtttaataaccggagccatagagaggtttggtttccccacgctcaacacgccaatgatttgattatcaaccattaccggagcggaaacgtacatcactgagctttgctcatcgtttggatcgctcaaggtactacgtgcgccgtattgaccgcgcagcgtcagccagacatcattccatttagaataatcctgcccgagagcctgcccggtggaatcaaaaatgacctttccgcgggcatcagtaagataaacccgatattcgttacgatctttgcgaataccggcgatattggcaccaatcggcttcttattcagcgtggcgaacgcttccgccaactgcccattcgcggcattacctcgctgcatatcctgccgggcaaactgcgctagcaaagtagcagtatccaccagcgtcccttcggtcgcacgcctcacgccgggtttcacttcctgcacaaaaatactgatcacaaagtagccggcgatcgccactatcaaaaaatacccgagcaacagacgcaggccaattttcatgggacatagctcagactgtagcccagcccacggtgagtacgaatcggcggttcttcatcccgaacagcgcgcaacttagcccgtaacgttttcacatgggtatctacggtgcgatcctgactttcttcggcctgagtccagacgatatccatcaactgttgacgggaaaaaatgcggtccggagctaataacagggttttaagcagtaaatattcgtaacgggttaaccagagaatttgttgctgataggtaatacgcgcggcggcttcatccaacgtgaaagcgccaaaccgatgaattagcggtacgggtgcgctggactgcgacttctgtaaacggcgcaaaatggtacgaacccgtgcgctaacctcgcgcggagaaaaaggtttggctatgtagtcatcagcaccgatttctaacccgactatgcgatccagttcttcactgcgcgcagtaagaaagaccacgggtaaatccggagataaggccaacagacggcgacaaagatcaaaaccgttaatatccggtagcccgacgtcgataatcgctaacgctggcaggccgtgatgtaacgcagcaagcgctggctcgccgcgatcaaaccacttgagggtgaacccttcactctctagcgtatagatcagcgtgtcggcaatactcggctcatcttccaccagccagatcaatggtttcattacttactacctgctgcagaatcaaaagtgtgttgaaatatcaggcacagctcgcgccattcatcttcagacatgctatcagaggctagccagacgcgctttctacgctgactgccggcgccttgaagcgataatagtacgccataacgggtaatccacggctgtcgaaccaacttccattcctgacgtttccatatcagcagatttccagcttttaaccggatttctccctggcgggaggtaatgcttttctggctacgaatacattcgaaaacgaccagcgtcaacagtatcaaccataaaggtgtacagccatctggccaaggcgcgaccagcgttatcaacaccaaaacgccatgaatcaataaggaaaaaagttgggtgcgccatgaaacccgcaggtcacatcgccactgggccacgggctttatttcgcatctgaatcagttgaaccatccgtttcagctcgctgtcctgcggctccccatgattcatcagccagttgaataaatcaggatcatcgctcgtcagcaagcggacaaacacgcgcttatcgtcatcgctcagcgtgtcatattcatactcaaagaacggcataatggagatatccagctcacgcataccgcgacgacatgcccagtggatacgagctttattatcaatttccatgtcctgattgaccccttgcttaaaatgttatttgaatctggccggatggccgctctgccaaagattcaactcgtgaatagagtagcaatttgcgacgcctgacgggaaggttatcgccactaaaacgcggactaaggcgtgaaatgataaagcaatgtggattttttgaccgcattaatccgcgctcgttgttatttttgcgcattgtaccgcaggatgtattgtaacaatggtgtatgcggataattactctttgcaaaggctcccgcctcttttaccattgggtcatcagtccacggcaccttttggtaggatgtaatatggcatatgcaactccgttccctccgcgtcaaccctccgcctcttctgcgttacctttgactctgatttcattggatgactgggcattagttacggtaaccggcgccgaacgcgttaaatatcttcaaggtcagctcaccgcagacgttgatgcgctagcggtagatcaacacgttttgaccgcgcactgtgacgcaaaaggtaaaatgtggagcaatatgcggctcttccatcggggcgaaggattggcctttattgagcgccgcaatgtgctggaaaaccagttggccgagctgaagaaatatgccgtattctcgaaagtgacctttgctattccatctgacagtgttttgctgggaatcgccggggcgcaggccagagaagcgctggctcaggttttccctgaattaccgacggcagaaaaaccggtagtccaatccggtgatgctacattgctgcatttttctacgcccgcagaacgtttcctgttagtgaccgatgcagctcaggccgccagtttagtagagaaattgggtgagaatgcccagttaaatgacagccagcagtggttggcgttagaaatagaagctggattcccaattattgacggcccgaatagcgcccagtttattccacaggcaacaaacattcaggctctgggtggaatcagctttaccaaaggctgctacacgggccaggaaatggttgcccgagcaaaatatcgcggagcaaataaacgcgccttgtattggcttgtggggcaaggcagcagcacgcctgaagccggtgacagcttagaatggcaattgggtgaaaactggcgtcgtactggtacagtgttggccgcgattcaacttgaagatggctcgctttgggttcaagcagttctaaataacgatctggccgccgatagcgtgttacgcgtacgggaagatgcggcagggacattgcgtatccaaccattaccgtattctttagaagagaataattgatcctctgccaaaacaatttatagcccgtatcgtcttgccaggaaaacatagagacaaggcgagatcagaccatgcgagatctggcagtgcaagataaagaggccggtaatccggcctcacaatctacagacggtatctgtctttagcgaaactatcgtgatattcagggaaaactctggattttctgggtaacgcaacaatctagtgttctggaatagatttacatcttaaacgtacagataaattgccataaagtggcacaggctaccgccaagcacgaaaccgtgccaaatagcgtgaccaaagcgaatacgcttcgaagcgtaaaacactactcccagcgtatacagcaaaccgccaatcgccaacagtgcaataccgcctatatctaacttaatagccaactgatagataacgatcagggatagccatcccatcgtcagataagtaatgagcgaaagcacctcaaaacgatgcgcaaatgccagtttgaagataacgccaaaaagcgctagcccccaaataaccgccattaatcctctcgccaaagtagaatccagcccaaccaataagaaaggcgtataagtgccagcgatcaataaatagatagcgcagtggtcaaatttcttcagccaatgcttagccttttgatgtgggattgcgtgatacaacgtggatgcaaggtacagcagaataatgctgccaccatataaactgtagctggtgagcgcggtggtacttgcaccgctgtctacggcctgtaccagtaataaaaccaagccgattatgcctaataccacgccaataccgtggctgacgctgttggctatttcttctgcccaaggataaggctgagcttctgataatgccggtttgactgattcattgttcaatactaatgtatcctgttgattcttatgggtgcgggtgatggacattctgtcaggttttgacctgttcattattattggaatcctcgcaggttaattgtgcaaaaataccgctttaaggttatctgagaatcattccagtgtacacgtgtaagctcaaaataatctgtcattgtttgtaaaccttggcctgcccgcccgagaaaatcgataactgactaaaaccccgctcaggttagcgaaatgctgcacagtctggcctacactctatccgcgccattgttggtatacgccctatttttctcgaggtttactatgtctttcgttcgaccagttctggatttcggccctttgactgattcaattcagtttttgatggaaattgataagctaaaaagcattcaacgcagaaccaagcttattgcctgcgaacgtcaggaaaactcggcggagcacagctggcatttcgccgtcgccgctatgacactagcaccttatgccagcaaagatgtggatatcaatcgagtgattcaaatggcgctgttgcacgatatcgtcgagatcgatgccggtgacgtgatcgtctacgatctggcggcgcgcgcagctatccatgataaggaagtcgccgcagccaaacgcctgtttggaatgctgccgccggaacaaaatgcaaaatttagtgcgctatggcaagaatatgaagatgaaaaaacgcctgatgcccgttttgccacggttctggatcgcattttacccatgctgatgaatttgcataacggcgggcaaaattgggtagaaaacggcattcgcctagagcaggttgtcgagcgtaatcagctagtggctgaagattatcccgagctgtggagctatttatttcgtcatttacaggatgcacaggctaagggctggttggcctgagacatgacgaaaatctcagcgataggttcaagagtaatgcttcatattgagcattgagcattgagcattgagcattgagcccagagtttgaatatctgtacctgaataactcatatttaaatcactagcgctggaatgacgatcatcctaataatgaaacctgctgcccgtattttgctcgggcagccttctcaatcaaagtgttactttccacctgccaattctagtgcgctgccggtaacgtaagaagcgctatccgatagcagccaaacaatggcttcagcgacttcatcgggctgaccaccacgtttcatgggtagctggctcgccactctttcaactctgcccggttcaccgccgctggcatgcatttcggtatagataaaacctgggcgcacgccgttgacacgaataccttcccccgcgacttcgagcgataagccagtggtcagagtatcaattgcacctttcgatgcggcgtagtccagatattcgccgggagcccctaaccgagcggccgcagaagaaacgttaactatcgctccgccgcgaccaccgtgtctttttgccatacgttttaccgcttctcggcaacagagaaaatagccggtcacgttggtactaagtacccgattaattcgttccgcactaatcccttcaattcccgattgttgaaacaaaataccggcgttattgaccagcgcagtaatagtgccaagctgattatctaattgattaaacaactcaataacttgttgttcgtcggcgatatccgcctgcaaggccaccgcccggccgcccatcgccacaatctgatccacaacctgtaaagcggcttgatggtcgttgacgtaattgatgccgacctgataaccctgctgtgccagtaataatgcggtggctcgccctatccctctgctgccgccggtgactaatgcaattttttccatagcatcatctctgctttattttgttgtacggtctgacgtcagaaaattttcgcccaaatcagtacccctacctgcccgatattattcatcggcattgtcggcgtacgtaggatcagtcgatctttttcaaactcatagtaacgaaccatctgggtgccaacccaattaggaaataggccaccttcaacaatatgagtaatactctgtttttcctcattaatctgataacgaccaaagtagcaaagcgcgctctcgaaagccgatttcatttccgcatcactgccttccagccagtccagagaggcgaaatcacggcgctcagtggtataaagctgagcagccatagtgccattttttttgtaatgtatccggcctgataccttctcgcccattgggaaagaaacactgccgtcttgcaaaataaaatgctgtgaaaattaagcccagctcccaaaaattctgtcactaatcattataattacgctaatatttgtttatatgaaaagtaatcgtagtcattgatagggttatattccaatcaggaaataatgcgcagaattagtaataacttttgattgtctgggcagattttagatagaaaaagggccgctttcgcgaccctataagcaggttactctttagtgattactcgtaatcaccgataggaacgcaggaacagaataaattacggtcgccgtacacatcatccagacgttttaccgtcggccagtatttattttccatcacgccagcaattgggaacacggccaactcgcggctatacggatgagtccactcacccaccagttcagcctgaatgtgcggcgcgttcaccagcgggttatcttctagcggccattcgcctttcaccactttgtcgatctcggcgcggatagccaacatggcatcaataaagcgatccagttcgaccttgctttctgattccgttggctcaaccatcagcgtcccggctaccgggaaggacatggtcggcgcatggaaaccgaagtcgatcagacgcttagcgatatccatttcgctaataccggtttcttctttcagtggacgaatatccagaatacattcgtgagctacgcggccatcgtggccggtgtacagcactggataagcattttttaaacgagtggcaatgtagttagcgttcaaaatcgccacctggctagcctgtttcagcccctgagcgcccatcatgcgaatgtacatccaactgattggcagaatagatgcactaccgaacggtgcagcagaaactgcgccctgctgcgtcgtcataccgtcgatttgcacaacgctgtgacccggaacgaaaggtgccaaatgcgctttcacgccgattggccccatgcctgggccgccgccgccgtgagggatacagaaggttttgtgcaaattgaggtgagaaacatctgccccgatataaccaggagttgtgattccaacctgagcattcatattcgcgccatccaaatacacctgaccaccgaactgatgaacaatctggcagacttcgcggatggtttcttcgtacacgccgtgggtagacgggtaggtgaccatgatgcaggaaagctcatcaccggcaacttctgctttctgacgcagatcgtgcaggtcaatattgccttgtttatcacaggccaccaccaccaccgacataccggccatttgtgccgacgctgggttggttccgtgagctgagcttggaatcagacacacatgacgccgggcttcattgcggctttcatggtaacggcgaatagccagcaaaccggcatattcaccctgagcaccggagttcggctgcatgcacacagcatcatagccggtcagttgcaccagccattgtgacagctggccaatcatttgttgataaccggcggcctgctctggcgggcagaatggatgcaactcggcaaattccggccaagtgattggaatcatctcggcggcagcgttcagcttcatcgtgcaagaacccagcggaatcatcgcctgattcagcgccagatcttttttctccaaacgatgcatataacgcatcatttcggtttcgctgtgataactattgaatactggatgcgttaaaatcgggtctttacgcactaaagcttcaggaattgagcggctttctttgctcacttccgcatccagcttatcaatatccagaccgtgttcatcacctgccagcagagcaaacagagtttgaatatcttcgcgagaggtggtttcgttcagagtgatacccaccgcgccatgaatatcggtacgcagattgataccaaagcttagggcgcgcgccaataccgccgctttgtctttcacttcaacggtcagggtatcgaaccaggttttgaaacgcagagtcagaccggcttgttgcaagccagcggccagaatgtcggtcatgcgatgaatacgaccggctatgcgttgcagcccctgcgggccatgataaaccgcatacaggccggcgatgtttgccagtaatacctgtgaggtacaaatgttggagttagctttctcgcggcgaatatgctgctcacgagtttgcatcgccatacgcagcgcagtgttacctgccgcatctcgggaaacaccgataatacgacccggcattgagcgtttgaactcatcgcggcaagcgaagaaagcggcgtgcgggccgccgtaccccattggaacgccaaagcgttgagctgaaccgaaggcgacctctgcgccctgctggcccggagcggtcagcagtaccagtgccatcaaatcggcggccatacaggtaattattttacgttttttcagcgctgtcagcagtgtgccgtagtcgtgcagctcgccggtggtgcccacctgttgcaacagcacgccaaagacgccctctagctccagcactttttcagcgcgatcgacgataacgtcaaaaccgaaggtttcggcacgggtgcgaaccacgtccagagtttgtggatgaacatcgtctgcaacgaagaaacggttggcatctttcactttgctggcgcgtttacacagcgccatagattcggccgctgcggtagcttcatccagcaaagaagcggaagccagatccagaccggtcaaatccagagttaattgctggaagttcaacagcgcttccaggcgcccctgcgaaacttctggctgataaggggtataagcggtgtaccagcccggattttccagcatattgcgcagaataaccggcggagtcagcaccgggctgtagcccatcccgatataggatttatagcgttggttttggctggcaatcgctttaagttcggccagagcctgatgttcagtggctgcgtcacctaccggcggcgggcccggcaattgaatatctgccggaacaatctgctggatcaatgcacttaacgaacggacacctacagtagccagcatttcttgctgctgctcggcgttagaaccgatgtggcgctggataaacgcgtcgttatgttcaagttggctgagagtctgagtcatttgctacaaattcctgaatcaagcatgggacgggatacggtcggtcgatacaaaaaaaagccccggctcagcaactgaaacggggcgatactcttattcgtccagcgtggtgcgataggcgtctgcgtccagcagactatccagctctgactcgtcagaagccttgatgctgaacaaccagccgtcggtgtaaggtgcgctgttcaccagttccggggagctttccaaatcggtgttaaccgcaacgatttcgccgctgatcggcgcatagatgtctgatgccgctttaacggattcagccacggcgcagtcgctaccggcagaaacatcgctgcccacttctggcagatcaacaaataccatatcacccagtaattcttgtgcgtgttcggtaataccgacgctataaacaccgtctccatcggcacgaacccattcgtgagaggatgcatacttcaattctgttggcacattgctcatggctaccttctccttagaagatattggtgatttattattagacgaaaattacagcgcgatcgctttacctgctcgcacaaaacccggtttggtgaccttaaccggcatagcgcggttgcggatttgcaccaccgcctgctcgccaatacccgcaggtactcgagccaaagcgatactaaagcctagcgtaggagagaatgagccgctggtaatcacaccgttgtgtacgttgcccgcatcgtcggtgaaatgcactggcagttcgttacgcaatacgcctttttcggtcatgatcaggccaaccagtttgtcagtgcctttggctcgctgctgttccagcgcttcacggccaataaactggcggtcttccggtagccaggccacggtccatcccatattggcttccagaggggaaactccttcatccatttcctgaccatataaattcattccggcttccagacgcagggtatcccgcgcgcccaaaccggcaggcttcacgccagcggctaacagtttctgccagaaatcaactacctgctcttttggcaaggcaatttcatagcccgcttcgccggtgtagccggtcgtggcaataaacaggtcgccggtttgtacgccaaagaatggcttcatgtcggcaatagcctgtttttgctctgcgctgaataaagtcgctacgcgctcctgagcctgcggcccttgaacggcaaccagcgccaaatcgtcacgcacggtaatatcgatgccgtaaggttctgcgtgctgagtgatccaggccagatctttgtcgcgagtcgcggagttaaccaccagacggaaataatcttcactgaggaagtagacgatcaaatcatcgataacgccaccagatgcattcagcatcccggtatagagggctttgcccggctgggtgagtttggcgacatcattcgccaacagataacgcaggaattcacgggtacgcgcaccgtgcaaatcaacaatggtcatatgggaaacatcgaacataccggcatcttgccgaacgatgtggtgctcatctaactgggagccataatgcagcggcatcatccagccatggaaatctaccatgcgcgcaccgcacgccacatgctggtcgtacagtggagtctgctttgccatcttttccctcttttcactcaaacagtgttccggacacaagagaaattcagggcaccaatacgcgataaagataactcagactcataaatagatttatggccttaccgctggcaccggctgacttgctcaacagaacgttgcgtcagaccaaatcatcagacttcggtgaacggtcgtgaaattgcggctaaacaccgagacgcaaacgatacctttcacctgacgttatcactgaatcgacaaaggaaccataagctaaattacaaggtgaacggttcagcaaccacaaaaggcaggggtattgtgcagagttttcaactggcaaactgcgtacagagacacaaaattaacaaataattagtaaaaataccgatgttatataactaaaatgccggatagccctcagtttcaacttttaggtattcggcacttcatgagaaaatgtaatgcgaaaatggtgctggaattagattttttcaatcgagcagctaaggttgcaaccactcgggaatatcattcagtcccattgcctgacgaaccagtttaggtttcaccccgggaagagagtctgccaacgttaagccaatgtctcgtaacagtttttgtgccggattattgccagaaaacagttcgcggaagccctgcattcccgccagcatcagtgcggcgctgtgcttacggcgacgttcatagcggcgtaagtataggtgctgaccgatatctttcccctgacgctgtaagcgacgtagctccgaaaccagctccgcggcgtccataaagcccaggttcacgccctgtccggccagcggatgtaccgtgtgagcggcatcaccgaccaatgccagacggtgtgcggcaaagcttcgggcataacgccccatcagtggaaatgtttgtctatcactttcaacctgacacatgcctaactgcatatcaaaggcaacacccagctcacggttaaactgctccggcggtaattcggcaagtcgtgccgctttttctggcgctaatgaccaaacgatcgaactgagatttggctcgctaaacggaagaaatgccagaataccgtcaccgtgaaacacctgtctcgccttagcctgatgaggttcttcggtgcgaatagtcgccaccagtgcatggtgaccataatcccagaaggtcagcggaatatccgcatgttggcgcagccacgaattcgcgccgtcggcaccaaccaccaatctcgcgctgagcaggcgatcgtcggtcagagtaataaaagcctcgctttccccccaggctacctgcttcaaacttgccggagccagcagagtgatatcaggcagttggctggcgcgctgccataatgcttgctgaatcactcgattttcaatgatatggcccaaatggctaaaaccgtactcatcggcgcggaaagcaattttaccgaagctgtcctgatcccagacttccattccgtcataaggactggcacgcatcaccagaatgctgtcccagacgccaatatgctgaagcagcttttcactggcggcgttgatagcagaaacccgcagttccggtgcgcccgtcagcggaacggggagttcgtcttccggctgatgatgctccaaaatggcaatacttaagccacttccctgtaaaccacaggccagcgccagtcctaccataccgccgccggcgataactaagtcaaatgattgcatgctactttatttcctgtcgtgaaaacggcaaagaacctgcccaccagcggcggcaggatctaaatggggtggattagcgctcaacccaccccagagtgcgtcgtgcaaaagcatcgcgcatcgttggcatctgttccatcgccattagccccaaattacgccctgcggccagcggagcgtaattatttgcgaacaaacgaatcaacccatcggtcacgccaatggttgcctgttggtccttgtaacgacgattttgatagcggcttaatgcggagtaagcgcctaaatcagttccagcctgcgtcgcttccgtcaaagtttctgccaatgacataacgtctcgcagaccaaggttaaagccctgaccagcaatcggatgcaaggtttgcgccgcgttgccgaccagcgccagacgatggctaatatggcgggaagcggtcaataaacgcagtggatagctgtggcgtttaccggctttcagcatttttcctaaccgccagccgaaggcggtttgcagctcagccagaaattccacgtcgtcccaggcgtcaactttggccctatcttgctgcggatgacaccataccagagagctacgcccaccagacattggcaataatgccagcgggccgtggcgggtaaagcgttcaaacgcgcggcctgcgggcatttccgacgtcgtaatattggcgatgacggcaatctgatgataatcctgctgctgccactgaatattgcaggcggcggccagtttggaatgagaaccgtcggcagcaaccaatagctcagccgtcagtcgctcgccgttatccagtatcacgctggcgtgttctaccgttctctgtacatccacaaccttagcggggcaatgaagggtaacgcccggagccttagccagcagcgaaaacagacgctcaccgacgtcgtgcaactcgataacgttacctaaagcgggaacccgatagtcatcggcacgcagattaacaaaaccggcgtggccagtatcgctgacctgcacgtgggttatcgcagtggcacaatccgctagcgcgggccaaatgccggttcgctccaactgctgacaagtgccttgcgacaaagcaatcgcccgcccatcaaagcccggatgggcgcgatcgccaggtgcagtcgcttccaccaaagcgacttcgacctgacctttggtcaatgccgaaatcgccagagccagcgtcgcgccggccataccaccgccaacaataatgatactcatcgcttactttgccgccgccattaaagcttcaatatcttctgctcgtttcactacgcttgccgtcaggttttcattgccggtttcggtaattacaatatcgtcttcgatacgcacgccgatccctcggtatttcacaggcacatcggcatctggcgcgatatacagacccggctcgatggttaataccattcccggctttagaatacgtccgcggtcgctggtttcataatcgcccacatcatgcacatccatccccagccaatgactgagaccatgcataaagaacggacgatgagcctgctcggcaaacagctgctctacatcgccttttagaatacccaaatcaaccagtccgctgatcatgattcgcaccacgctatcgttcacttcgcggatgctgatgcccggtttgaacagttccagcgcggtttcaatagactctagtactatgtcatatatcgcgcgctgtggcggagagaacttgccgttgaccgggaaagtgcgagtaatatcaccggcatagccctgatattcacagcctgcatcaatcagtactaaatccccgtcccgcagctcacattcattttcggtgtagtggagaatgcaggcattctcgccgccgccaacaatggtgttataggcagggaaacgcgcgccgtggcgggtgaactcatgcagaatttccccttccaactggtattcaaatattcccgggcggcatttttgcatcgcacgagtatgtgccaaggcgctgatttcgccggcgcgtcgcatcacttgaatttcttccggcgatttgaacaaacgcatttcatgtagccacgggcgccaatcggtcagcgttgccggagcgcgcagatttttacggaaaccattacgcaactgttccaatgcggcaaagacgattttgtccgcataggcgtattcgccctgagcgtgataaatcacatccaacccattgaataataggtgcagttgctcatcaatttcatcaaatggcaaggcacgatcgacgccgagttttgccagtgcagcatcctgccccaagcgacgaccaaaccagatttccgccgttaaatcccgcacccgattaaacaacacgctgtgattgtgggtttcatcgcttttcaccaaaatcagcaccgcttcaggttcgttaaaaccggttaggtagctgaaatcgctattctgacgataaggatattcggagtctgcgctgcgggtggcctccggcgcggagaaaataattgctgcactggctggcgccatcttcgccaacaatgcctggcggcgattttgatattcttgctgagtcattaccttctcctgaaatctattgtatcgagtttgagaaacgatcaattaatctgggaaaacctctcagcctgtcgcaataacacacgccaggcagcccgcagggcgaatggactgtgccacgcgccgcaaatccgctgttagtgcagagtcggtttcggcaactcgaccgccgtcggcttctgctgagtgaattctatatggcacagcaatgccgcaactcgaacatattcagcgacttcttctaaagactgagccagttcttcctgatcttcatcttcgtcgtagccaagctgggcgatattacgcaggtcgtcaatggcttcgcccacttcgtctttcacctgagccagtttaggctgaagcatacccaatcccagcaagaagtgattaacccaaccagataacgcatcggcgcgatcgaatacgctgatttcatcgccttccggcagcatcaactggaacataaagccttcgttttcaagcgcttcttgcgtagattcatgcaattgttgcagtggcagacttagcgcctgcgggaaagccacgccttcgttggtcagctcatgaactagcgcttgccagccattatcttgactgccgccacacagcatcccgctgatcaggccatgcatttcggcaggagtaagggcgatggcctgctggttcagcgcctgagcaagagattggtaagttggtaatgtattctgtatggacatgcgtattcatcatcgttggcaggataagttcgtgttatgctaccaccaagatcagtcgctataccagaaaacgcaacgctataaaggggttgtatcttggtatcgaggtatatatagtggcgcccgctttgaccactaagggcaatttgcttatggtgttacagggctagcgcggaaattagtcaggaaggtggcatgtctgcacaaccggtagatattcaaatttttggtcgctcgttaagagttaattgtccgccagaacaacaagatgcgttgaacatggcggcagaagatcttaaccaacggttgcaagatcttaaagttcgcactagagtcaccaatactgagcagttagtttttatcgcggcattgaacgtatgtcacgaactggctcaggaaagattgaaaacgcgtgactatgcatccaatatggagcaacgtattaggatgttacaacagaccattgaacaagcgttgcttgaacagggtcgcatctctgaacgtcaggatgcacaatttgaataaatcgttgttgaatgatagattcgacagtgagtaaagaatttctctgaggtgttcgccagcgggccagtcccctgagccgatatttaataccaacagaatgttgtgatccgtaaccggtgagcatgctcggtccgccgagaagccttaaggtagcgacactgcgttcaccttgaaccaagggttcaagggttacagcctgcggcggcatctcggagatccctttatcaatcatgatgttgtgagatcatggttattcgataagttcgattcaatacaggcagcctatgcctttcgatccccagcacggtcctttacggcaacaaatcagaaacgacatccgccaacggcgacgcttgttaactccggaacaacaatacaattctgcccggctcgccagccaacaaatccagcgtcatccccgaattcagcaagctcgcagcattgcgctatttctctctttcgacggtgaactcaatacccaacctattattcagttgctctggcagcagaaaaaacaggtgtatcttccggttttacacccgttcagccgcggcaatttattgtttttacgctacgcgccggaaacgccgttagtactgaatcggctaaaaattcgtgagccacagttggatgttaaagaggttttgccactttctgagttggatatcatcattacgccactggtggcgtttgatcgtcacggacaacgtttaggaatgggcggcggattttacgatagaactttacaatactggcaacacaatggcccctaccctatcgggctagctcatgactgccagttagtggacgatttacccgtggaacactgggatattccgctgccggaaattattacgccatctcaggtatggcgctggtagtgactgaattatttaaaatttatcggcatctgctgataccgataaattgaataaaccgccatttcatccaatagacttcgcctctacgacgcaaaagatgaagggtatcgatggttagtagagcaaacgggcgcgaatagtccccggaatcgccttcattaattgcagagccgtttcagccctatcggtgccctgagtttccacatcgatcaccacataaccaatttccgagctggtttgcaggtactgcgctgcaatgttgattccctgctcggcaaaaatctggttaatgctggtcagaatacccggacggttttcatgaatatgtagcaaacggctggcattgtcaccgtgagcaggcagggaaacctctgggaaattaaccgccgaaagcgtggagccgttatcggaatacttagccagtttccccgccacttcatcgccgatattctcttgcgcttcttgcgttgagccgccgatatgcggagtcagcagcacgttatcaaattcacacagcggtgaattaaacggatcgctgttggttgcaggttcggtcgggaatacatctattgccgcaccggcaatatgattgctagccaaggcatcacacagcgctggaatatcgaccacggtgccgcgagaagcgttgatcagcagcgcgccgggcttcattagcgctaattgctctgcgcccatcatattgcgggtcgagcgagtttccggcacgtgcaggctgaccacatcgctcatgttcagcaaatcagaaagatggcgaacctgttgagcattgcccagcggcagcttgttttcgatatcatagaaaaagactttcatacccaggctttcggccagaataccaagctgggtaccgatatgaccgtaaccaatgatacccagttttttgccacgcgcttcataggagccagcggccagtttgtgccattcgccgcggtgggctttggcgttagccgcaggaatgccacggaacatgagcaacagctcgcctaacaccatttcagcgacggagcgggtgttggagaacggcgcattgaataccggaatgccgcgtttggtcgccgcgtttaaatcaacctgattagtgccgatacagaaacagccaaccgcgaccaatttctctgccgcagcaaaaacttcttccgtcagatgagtacgcgatcttaaaccgataaagtgagcatcacgaatcgattctttcaatgattctgtgtctaaggcacctttatggtattcgatattgctatatccggccgcacgaagattatcaaccgtgctttggtgaaccccttctactaacagaaacttaattctgtctttttccagtgatacttttgccatttccccaaccctattttcagacttcagatgcggctgcctttgtctatgaatctggctagcacccagtcaacataacaaatattacggcggcatcaatacaaacgattgcctggggttcagcacaaatttcactcaggcaggagttttgcggaagaaaacactgtgtaacagcaagttaacggcaggttaatggaatagagaacatcaatgtgacatatgtcactaaatttaacctttttaagaaaagatgattaatcgcaaaaaatactcgggataacgcgaaaacgtcatcccgatgacctattttaaccagtaaggcttattgagcagtgattgttttcacgccatctgcggtaccgaccaaagccacgtctgcaccacggttagcaaacagacccacggtgaccacgccagcaataccgttgattttattttctaacgcaatggcatccagaatatccagattatgtacgtccaagattacgttgccattatccgtcacaacattctggcgatattccggcaagccgcccagtttgaccaactcgcgcgccacgtaagaacgagccattggaatcacttcaaccggtaaggggaatttccccaacacatcaacctgtttagacgcatctacgatacagataaatttacgcgcaatagctgcaatgattttttcgcgggtcagcgccgcgccaccgcctttaatcatctgcatatggccgttgatttcatccgcaccgtcaacgtagatgtccaggtcgtcaacttcattactatcaaaaacgtggatgcccagacttttcagttttgccgttgaagcgtcagaactggaaactgcacctttaatctgatgtttaatcgagcctaaggcatcgataaaatgtgccgcagttgagccggtgccgacgccaacgatggtgtctggtttgacataatccaatgctgcccaacccactgcttttttaagttcgtcctgagtcatggtcatttcactgcctattaataatatgaaaacctgtcgctattatagaacatgcgggagggaaatctcgccaattaagcctgactcagatggtattaatccactctggatcacagatatgttcccgcacaaccgctgaatttccgttgatttttgccgcagcaaaatagataaactgtggcatagtgccttattaaacttattttggagagattactccgatgaaacgcccagactaccgaacgctgcaagcgctggacgcggtgatccgtgaacgcggctttgagcgcgcggcacaaaaactttgcatcacccaatcggcggtatctcaacgtattaaacagttggaaaacctgttcggtcagccattattagtacgtaccgtgcctccacgcccaacggagcaggggcagcgtctgctggcgctcttgcatcaggttgaattgctggaagaagaatggctgggtaacgacaacaccgtggatacgccgctgctactgtctctggcggttaacgccgacagcttggcaacctggttgcttcctgcgctaaaaccggtactggcggattcgcctattcgattgaatttacaggtagaagatgaaacccgaacgcaggaacgtctgcgtcgcggcgaagtcgttggcgctgtgagtatccaaccgcagcctttaccaagctgtctggtggatcaattgggtgcgctggattacctgttcgttgcctcaaaaagctttgccgagcgttacttccccaacggcgtgactcgtccggcgttactcaaagcaccagcggtcgcctttgaccatctggacgatatgcatcaggcatttttacagcagaattttgatttatcgccgggtagcgtcccttgccacatcgttaattcttcggaagcctttgtacaactggcgcgccaaggcaccacctgttgtatgattccgcacttgcagattgagaaagagctggagtcgggagagcttatcgatctgacgccgggattattacagcgccggatgctgtactggcatcgctttgcgccagaaagccggacaatgcgaaaagtgactgacgccctgttatcacatgggcgtcaggtattacggcaggattagtttcgcggttttatttcgccggattcagttggaataccacgtcgacctgatcgtcaaagtgaatggtctgctgctcataagtttgggcagcatcgcttgccatgcccgcttccggacttttatacatgcgcgctaccggcatgggctggtagttggccacgcgataacgaatactgtacaccggccccagagtagctttaaagccctgagctagagaaccggcctgagaaatcgcgttatcgatggctttcttacgcgcctgctcacggtaagtctctggattcgctacccctaattcaacggcgcgaatttcattcaaacccgatttgagcgcgccgtccagcaactcgttcagtttatccaactgacgtagagtaacctgaacctggcgcaccgcccggtaacctttcagtactgcttcgccggttttcttgtagtcgtattccggctgagtacgcaaatttgccgcattgatatctttcttctcaataccatttttcttcagaaaatcaaaatattgagccacacgagtatcaacctgtttcttcgcttctgcggcgtctttggcggttacgctaacttcaatcgccaaagtggcaatatccggcgtagcgtcaacgctggcggttcctgaagtcacaacgtgcggcccttccggcagctcagcggcctgcgaagccaaaggtaacgttcctaatcccatcattgcggccaaagccaaggtctttaacttcacggtgcctcctaaaaatatgccgatacgaaaaatcgctgcgaagcacggtttatcagtcaattacacctaagagcaagcttcttttcagttaattactcttactgacgaccggaatcatgcacaattattttgtcgcttagttaattcagtaacctaacaaagctagcacatcttttgccatgaagaattcagaatagtgataaaaaatcaaaaactcaggccttgtttagccaactgaaaggcaataaaccacatcacaccgccgactaacaaattgatccctctttgcgccgctgggcgattgagccagggagccagccacgcggccagcaacgccaaggcaaaaaaccaactgatagaggcactgaccgctcctaaagcgaaccatggtctgacatctggcaataactgaccgcccagactgcccagcaccacaaaggtatccagataaacatgcggattgagccaggttacggccagcagagtaacgatgattttccagcgatttttcacactgctgccttcaatcgtatcctgaatatctccacgccatgcagcgcacagcgctccccagccataccacaacaggaaagccacgccgccccaagttaccagtgccaaaagcagcggcgattggttgagtaaggcactaccaccgaaaataccaccacaaatcaggatgatatcgctcagcgcgcagagcgcagcgctcataatgtggtgctggcgcttaattccctgattcatcacaaaagcattttgcggccccagcggtaaaatcatcgcggcgcttaaagcaaaaccctgaagaaaaatggctaacatgttgttccctttagataatatccgctaatgtgcgaaccgattgcgagcatattacggcgagatagtcatcagaggaaatggatatttcttatccatgataagacgtgctaataatcaacgcggaaataaataagataattgacgttaagaagttaagaagttaagaagttaagaagttaaaaataagccgcccaataaaaaacgggccattcggcccgctgagaagcatttattgccagaaaccgcacaattactccgccgcttttttctctacctgatgcagatgcacatccatttgcgggaaaggaataccgatattatgggcatccaaagcgcgtttgaagttctccagcagatcccaataaacctccaatgcatcgccattggtggtccaaacgcgaacggtgaaattcagggaagaagcggccatttcgtttaaacgaacgatcacgcctttatcatgcaggatacgcttatccccagcgataatatcgcccagcacttttttaactacgtcgatatcagcgtcataagccacgccaacggtaatatcggtgcggcgattaggttctcggctggtattaatgatgttgttggcaataattttaccattcggtactacgatgattttgtcatctacggtacgcagcgtggtagaaaaaatctgaacctgcaccaccgtaccggcgacgccgcctaaatcaacgtattcgccagcgcggaacggacggaaggcaaccagcagcaccccggccgcaaagttggacagcgagccttgcagcgccaaacctacggctaaaccggcggcaccgataacggcaatcactgaagcggtttgaacgcccagacgtcccaacacggcaacgatagtgaaggccagaatactgtaacgcaccatcgccgctaaaaagtcagcgacggtaatatcaataccacgcagacgcattacccggtttaccgcgccggaaaccactttggcgatgaccgaaccaacgatcaaaatcaataatgccgcaatcaggtttaccgcatattgaatcagcaaatcttgattgttcgtcaaccaggtgcttgcattattaatgccgtcaacgacgtttaactcttccatttttatcatcctacgaagttctcccaacctagagaaaattgcacaaaaacttccgccagccatcgaccggcatcgcatttaacccgttgagggtaacgaactatggacgcggttgccaactttgacagaaaaacaacaccaacagaatcagacttattacctaaaactcaccggataaaccgccatgattacggtatttctccgttggatacgctagaaaagaaaaaggctcctacaggagtattgtttttttgtttaataccatgaaataaaaggatttatttctttcaatgtccacacattgaccacatcaagttagagtcatactttaattacgacaaaacgcccgtatttgcgggcgtttttacttatcactatttcaggtgaaaaaattcagctaaaagcaggatttgaattcgataagtatttcatgctgtcagaacatcaacacttgcccgcctgcttgcgggtgaggcggtaccggatttatttcccctggcgtagaaatcgaacgcataaaactttccatcgtcacaaaggtatggccgcaattcacattggtgcactggtgatagcgttctttggtttcgatggtgatctggctgctgctgcgggtatgggctgcgctgtggcataaagggcaattgaacatgatccggactccggcatcatcccggctatggccggtgttaatgataattatgcgtgattgttgattcaaaatcatcattccatatccaaatcatctattttcacctctaattccagcgcggtagtaaagccgctgtcattcacggaatgagtgaccgtgaccaacgtccagtcggcgtcatctatctgttttttaaagccagtgactttaatcggcacttcggggtagagagcggctcgccccctggctaactgaatggagaacttggccgcgccgcgttgcagccgttcccaattggatttagccgctcgctgcgcattgtgtttgttggcgtaagtggtgcgcaaggtcagcacattctcatcagtgccgatcagatattcaccttgtttcgcttcgggttctttgggcttggcggtagtggtcgccttgcgtttacgctttcgttttaccttaaccactggtttttccgtggtacgggtattcaaccagttagccaccacgccggtataagcgccccggtcagccatactaaattgatggccgtcacccaaactgcggataatagtcatcactggaataggtttaccgctggcggttttcgcctgaccttgtttgataaataacagattgcccttttttacggcggcaatagccccgtattgttttgccagtcgggtaattaaattgccgtctgattcgttggtttggtctatatgttcgacgattaaatcagacatggccttatttaatgtgggtgtgagtttattgcgctcggcaattatcttcattatcccgccaatggtggttttatgataagactgatcgcggcgaatattgagcgtttcacgaaaatccgcactgcgggcgcgaatagtcagcttatccggtgcgccgctgtgctctatttcatccacggtaaaggtgcctttatcaatcaaggccgccccttgccagcctagcgcaagcgctattttagcccctcggcggggcagcactaactggccgtctgaatcatccagttcaatatcaagctggtcggcctcaaaaccgcgattatcggttagggttaatgacatcagtcgctttttaatgccgccgcttttatcgataccatccacggtaatagcataatccggcgcgttatgaccgctattggacaggatatcaatcatgataataacccgctggcggtgtcagagatttgcgcggcaatatcatcaaattgctgtgataaatcaccaaacatttcttttaaggattcatcagtgcgttttagcgtcagcgtgaattcaatcttgcgcgctgaaccatcactgaaaaagatacttttggtacggctaagattctcaatcacaaacatgccgtgaatggcaccgttcccctcaatcagtgaccaggctttgccggtttcagccatcaactgcaaggccatgagcgaggctttaccgccagtcagttcagggtatagcacaccggataaggttatcgattcttcatctggccccaaaaactgactgattggccgcaagccgatgcgggcatttgtcgggtgacgccatgccatttgatgctgaaaatcttgataggggacggtttgcaacataaagacaaacatccctaatgccatcatcataagtcgctccttaatcaatatcccgataactgctgttcatttttgccctggcgctgcgctcaagggcgctcaactggcgggcaatttcccgcgcaatatctattggagaatcattgggttgggcgataacctgaatgggtgcattgatatgcaccggcgtttctttgattatcgtcgtgtgagtctggtgggtggctcccgcctgagtcggcggcaggctatagggatgcatcggcgcggcagccgcctctccgccgctgaacatcagagcggcagcggttgccatcgtcgcggtgtttctgcggctggtgacattcaccgggccactgacaatctccggcccatactctcccactacgccaaattttcccaatgggatacgtccgcccgcgtcatgctcgccggtaaatcttttgcgaatagcctcggcgctgtgaccgattggcgtcggggcaaacgtgacaccggcggcctgagcggcagcggcaacccccggatgggttgctgccagcgctttggttttctccgaccgttcccgcacctcatccagtttttttagtacccattggatagagtcggtcagggccttcatcggggtcagcgccagatggataccgtccgccagaaattggccgaatgctttaccggcatcagcggctccgtttaaatcgcgcgtggtggattgcaccggttccagtagtttcttgaaccagccccagacctttttcaccccgttggcgatccactcaaaaacgggggccagtggcttgaaggcttctttaatcggcgcggcagcttgccgaaatccgtcaacaacgcctctcagaaatgccttaatcggttgccagtattggtaaatcagcaagccaacgccggcgattgccataccaatcaaaccaattggactgagtaaaacacccaaaacactggatacgctgaccagggcgaaacgcaggaatttaagcggggattttgccagccaggcgaggccgcgaccgagcattttaaatgccccaatacccgactgaaccggtgatttcgccacattaaccagcgcaccgcccagacttttgagggattgcaccccgttttttccggcatggcgcgacatggacaatatcgactggccgaaattgccaaattggcgggcggtgatcggggtggtgctggcgagacgggacatgcccgcagacaaattgggcaataagcgaatacccaacacgcgggtactgaaacgcagcaaggccagcggccccaaaatccccactacggcaatcgccagtgccccaaaagcggttgttgttatcgcgatagcggcaccaatctttacaacggcttggctgatttgcgggtgtgctttgaggaattcggccacgccgtgcataaattcgctgatgccttttgccgcagagcgcagccagtcgttatttttctcgaacagctcaacgctgatattttccatggccgcgtgcaatatggtcatatcaccggtcaggttatccagcatggtggaggaaacccgttttgcctcgccgtcatactcgcccggctggccgcgcattttcccaagagaaccattaccggcagcatgcattagcacaccgaacccagtcactgcatattgcccggcgatatctttaaaaatagcaccgcgctcaacgttgcccatcttgccggttttctcattgatatctttgaggatatccactaaatcacgcatattgccgttcttgtccgaggttttcacccccagatcggacacggccttggagccaccaatacggcttaaaatactgcgcatggtagtaccagcctgactgccctgaataccggcgctgccgagcattgccgtggaagccgcgacggtctccagactctgcccgtactcccggccaacacccgcagagtatttcagcgactctcccagcatcggaatgtccacgttatttcgggtaaataacgcggtgaggacgtcagcaacgtgatccatcttctcggcggggatccccatcgctgtttgaatgttagaggcgatatcggcggtggtgcctaaatcaatatccccggcggcggccagatttaacatgcccggcatcgcgcccaaaacctgcttaggtgaataaccggtacgaccaagaaaatattggccctgcgcgacttccagatcggtaaatttggaggacagcggcaacgttcgggcctgctggcgcatggcctgcatatcggctgagttcttatcggggatgcgggtcaccgcctgagttttactcatcatggcgtcaaagtcataacccacatgcaacgctccggcgatccctcttcccatcgctttacccgttgccatggaggtatagcctaatccggccgccaaggctttgcgctgattgctggcatcaaaatgattacgagcctgattaagccgttgttgttgctgagcctgttgctccagacgccgctgttggctgactagcgcggcagtggtgctggaaatattggcttttaagctgcgctgggcgtcacccagtcggtgagtggcaataccgctattttgcagggcgctacgctgatgatgcaaagaggtccgcaactcgctgtatttctgtttaagtttactggcttcctgtctggccttttgaaactggcgggcctgtttggcggtggtgcccccggaatttctcgccgcgatatcatactggcgtactttttcgcgggctgccgccagcgcctgagccgcaccgataacggcggctttagtctgacgaaatccctcaatactggccgactggttattcagctgctttaactggtctttggtggctttaatggcgacggccagcgttttattgctggcctgaatggatttaaacgggcgggtaactttatcgactgcgctaagtagaatctgcaagcgaaggtttttatcactcatcactgcctccgttgcggatcacggctttatgtcgccatgctaataattcacctaatgacatgggatcggtgacggtgggcggccagtgaaaaatgaccgcgatatccgccgtcaggtcgtctaccgtcaggctgtcaggaaatcggatttgaccgaattcggtaagaaaaaaagcgccacggcgttcgccaactgatacatatccgccggatcgaggttgctcacttcctgcgtggtcagatttggcgtggtgacgcggggcagcaccttaatcagcgaatctacatcggtatccagtagtgcctgaagtttggctccgcgcagtgccccggcattgggtttattaaccgtgacctcggtaatggtggtattgccacgcacaataggtacatccagtgtaatggtgttgaactggtctaaatcagtgagggtttcgtcggtcacttctgggggtgtcacagtttttttcatggtcatcatccaaaggaaaaagggaatagcggcgcgggttaacgtgccagaaaattacaggccgatattgcgacggtgggcttcgagcctatcttcgccgttgaccatttcgaccatattcacggtatcgatctcgatcagcacttcgccgtcccacgtcaatttgtagtagacgcatttggtggcgatttttaccgtggagctatcgccctgtttgctgtcgccggggtcgatttcctcatgacggcctcgcaccaccacttctaccgcgtgggtttcgccggtgtcgtcccgttggtaggaaccgacaaagcgcagcatcacgccgtcaactttggtcacgccccattgtttgtaaacctcggcatcgataccgcccagcgtccagtccacattcagggcatcatcggccagccccaaatccaccttggcgctgccgttcatgccgccaccgcgataatcttcaaatttgcggcccagcttgggcaaagtaagtgattcgatcacgccctgatagctgttcccggcgttgaataaattcaggtatttcagtttgcgtggtaaggccataatgtcggttccttagctgttaacagattgggcgaagttggccagatagcgatcggtgatgcgctggcgcagcatcaaatcttccagcgggggtactggcgtgtagtcgtaatcaataaacaggcgacccgctttgagggtgtctttgctgttgacgtcctcgtcataccagcaatcgccatcgatgatgtaaccctgtgatttcagctcgcgcattttggcgcggataccttcaataatgtctttggccatcgaaggattgagcgcgccatcaatggcccacatctgcgcgtcggccatcgtatcggccatcacctgcgcggtacgggtgtagttttcaaaggcaaacagcggatcatctgagcaactacgggaaccccagaagcggtaaccgtctttgcgcactaaggtagtgatgtcgtggctgttgagcaggtcagcatcggtggccgtgttctgtaaatcccaaaacacgtcggcgctaataccggtgacgccgttcacaccgacgttagacagggttttatgccagccggtttgctggtcaattttggcgcgtaagcctagggcgcgggcagtggcgtaagccgtggtttcgccattcgtgacgctatcccaactgaggaaatccggccagatcagcatggcttcacgctggctgaaattctcccggtacttcatcgcgtcttccatggtcttgcagccgtgggcgctgatataagcgaaagctcgcagattctgcgcgacggataataattcggtggataccgctagggtgtcatgaccgggtacacccaagatgcgtggctgtacgccgagttttccctgagcggctaacagggctttcatgccagttttgcggccgtcgggtgtggctccaccgataatattggaggtggtttcggcttcagtttcgccctgagccacgcgaacaaccacggtcagcggacgggtttggtcactgatggcatccagcgaacgggctaaggtgccggtttcgcccgctttgccgctggcggccagcacatcggtgagcaaaacgggggtattcaggggaaaggctttggcgtcggcatcatcggaggtacagaccattccgaccaccgccgtgctgacggtgcgaattgggcgagtgccttcgttaatttcaatcacgcgcgcgccatgatgataatcggttgacatggtttttctccggttaagcgttcaggcgctatgatgccggattgttgagcacggagcaggtgatgggtgttgtgtgggagatggcacaagagaggaatagaaaaccccggccagcggggctaaaaatcagtcttccggcaccaagaccgggataatatcgcgttacccctcaacataaatacataccctattacgattgcctctctgccccaaccagtatcgccgaaacctcattagacagcgtagtcatatccgccagtacgccggtgacgccctccggcttgaccatgtacggcagtaccagactgccattttttaccgcgctatcaacgcttgccagtgtatccgcgacgggctgcgccgccgctttaatgtccgcaagggttttggcctgtgcgatagacaccgcaagctgtgagacattcaccagtatcaggctcagcacatcagccaaaacgccctcccgcgaacgggtatccgctatcgtctcaatctgctgacgtaccaacattcgcacccgcaccgcgtcctgagactccagcccccggctggtaacgacataaccgccgctgcgatcagagtgcggcatcatttctttattgcttaacgtattcatttttacacctttattgtgttctgatggcttcgccgaggccgagattaaacagttgcggacaacgatggtcagggttccatctgcccgggatgatctgcggtaaggcaagataaagtacatctcccaccgcaggattacccgctaccccaatatccacatggctgtagttcccggcagcattaccactgaataagtgatgagtatgttggtgccaacggcctttaacctcgttgtggcaccaagaccagtcagcgccaccgataatcttgtaatacagcacaaaactcataaaacagccggtcggaatatgctggcttggaatatggaaagcgtaagggccaaatccgtcgatagtctttttgatggtgactttcataatgttgaatgcaccgtgaaaatggagcctatccattcccatgtactgcaataattcgcgcacaatcggcgcacgggtttccggcgctaccccagaagcgacggggatcatttcaatgtcgaacttatcccagaaatgaccgccggcatgtaatcccatacccaccggcaactgttgcggcggtattccggccaaatcgttcagggcggcgtttttattaacggccaaggctgaatgctcgtgtacctgcacatactggtcatgagggttagtgctgcgaacgtgatcggataatgccgtgacggaagcattagccgcagccttaaccgctctcggcgtcgccgcctcggtttcactgttgctgtcggtggcattgctcagggtgacaaagcctttctcgcttaacgtcgcatcgggatgattgcgggatttggcatggtcggccagcacgttatccgcgtactgcttaacctcaatcaccttatcatcgacatatttccgcgtcgccagtaccaccgacgggtcgattttcaatgtcaccgcttcggtgctgctgacaatcaaaatcatccgaatggtttgagtgcggccactgccttcctgtagttgcggtttgtaggtttcggcgcagttggcaatggcgaccaaatccccggcactgtcgtacaggccgatttcacggatccaccaaccgccctcattctctgggataacctgctcggcaataatctggctggtattgacagggtcaatgctcaaggcattcagcgctgcccggcgtttctcgccgataagctgggtttgtgctggattgggtgcgggtaaagcaccgcctccgtcgcccacggccatttgggtgatgtctaatcgggtgccgagcgcggtggcgttcgccagtttggccgccccgacgtgggtcagaagtgcatagaatctagcggtcatggttcacgctcatctcatcaatcatatgaatggtgccgccggtgtattcgctgccggtgacggtgataacttcgggtaaataggggtaaacggtcagctcgtcgccgctgtaacaacccgcgccaacgtaaaactggccgctgctgtccagatttatcgacaggccaatcaggtgacggctggccggtttggcgtcgtcaatcaggcgctccagttcgcggtacatttcttcggtaataccggtttccagcacgccgacatcaaggcgaaaagtgccggggatgtcgccggttttccaccactccagcaccttaatcagatagcccagcggctcgaccacgcgacggatagcgctgatggtgcctttgtgtttgtgaacgtaaaacgaggcgcgcaccacgctgcgcttggtcgcttccggccagctctcatcccagcgatccaccgaccacgcccaggctaaataaggcaataacggcagcgggcaggtgtcgggatcccatagctggcgcagtggcaccggcacatcggcaatcaccgtgcaggctgcggcggcggcgatttccagaggcgaggaaccggcaggcaataggcggttattcatccgacccgccgatcgccaaggtgtagccggtgcagtaggcggcctgagttttatccagcaccacatcggccagcggtgcggccagttcgacccgctgcacaccttccacatgcagggcggcatagatggccgataaacgaatatcacggcctaaacggtgctgggcgttgacgtaggcggccagtttgtcggcggcggcacggcgaatgggttcggcttccggccccggaaacagatagagtctggcgtcaatctggtaatcgacaatcacagcggattgcaccgtcacccggtcagccactggccgtacattctcatcgtttaacgccgcatccactttggcgagcagttctgccgacgccacgccgttgttttcgcgcgataataccgtgacagtcacgcaggccggggacggactcagcgccgaggcatcggctacccgaccgtcggcgctgcgggcgtgaaactcataggccccggtcggcccagccacgctcagaccttcaaaggcttgcgggatgcgcacccgaaaatcggcgtcggattccatcacggcggccaatggcggaatggcggttaaatctgccggggtgataagcaggcgctcgacgccattattggcacctaactgatcgaggtcgctgccattggcgtaagccaccatcaccgcctgcgcagcttcgttgactcgctggcgtagcagcaattctaaataagcgctttcctgcaatagcttaacgatgggttcggattcaaaggacaacgtcacccgcactgccgcctgttgttcagtaggataaagtgcaataaaggccgctttgcgctgattaagtaacgcttcaaattccagtgattccaccacctgcggcgcgggcagcagacttaaatcaatggtcgccattattgcccccttaacgggatagagagactgaggcgttcggcgctatccgagcggttgccgaacagttccaccgtcatttttccgctgttttcagtcgtgagatcaatcgccgtcagcgtcacgcggggttcccagcgcatgactgcgccatacaccgccgccatcattttgagccgtaaggcggggttctgcggctgatcaatcagcgtggacagcagcgaaccgtattcccgacgcatcactctggagccttgcggcgtgattaaaatatcgctgatagactggcgaatgtgagccatatcggtaatggctttgcctgtctgcgcattcatgccgagataagtcattgcggccccccggaggaatcaccgccacctttgacgccgccgtgttgatgggtgtgaaccacaataccgtttgaggtcagattgccaccggaatggttaaagtggcctcgcgcctcgccgccttcttcaatcagaagggttcgggtaatcaggtgttgagtacatttcaccactggcgtggtgagggtgatcgaggtttcggccacgatattggcggttttcatgccggtaatggctaaatgacgggttgcaggttcatattcaaatctggccccatcgggaaaagtcactacgatggcatccgctgaagccgagggtgccggattgctatcggaaaacaccgcgggcaacacaaaagcggtggtgagttcgccgccgatactgaggataatcacctgttcccccaccgagggcgcagcccaaaagcgcacccgaccggcgcggggcgtcagccagttcaaccagtcggtttctagctcgcccatttttacccgacataaacctttgaccgtatccacttcggatacaatgccgatgcggatcagattcgccagggcgcgtttaagtgctgcaataagcgttttcattcagccagtatgccgcgtgcgggcgcgactggcatgtgataggggttgtgtgagggatggcacaaagaattaactgcaaaaagaataaacgcgtgtattaaaggttaatcaaaatgtgaacaatatgggggttcggtaatacatcaggtgcatctaatgactaaaccctgtaacctccctacgttttattattttaaagggactttaaatggctaattcaatttatttgacattgcaagggactaagcaaggtttaatatccgcaggttgtggctcattagattctattgggaatcagtatcagtcaatgcatcaagatcaaatttttgtttactccttacaacacatgatatctcgcgctcaaaactccaatcatcatccgatagtttttagaaaaccgatcgacaaatcatcgcctttgctgggattatctatttccgagaacgagagtcttcactgtactttcgatttttatcgaacaaataacgcgggttctcaggagaagtattacaccatcgaattgactaatgcggcactaacaaatatccatgttgattatcctcactcactgacccatgcaggtatgcaaccggaagaacatgtatcagttcgctatgaaagtattatctggcagcatcatgttgccggtacatcagcatatagcatttggaatgaccgcgttttataaggattatcttgtggatgagattaataccatatccaacaaaatcgtagcgtcctttgaacctgatggtgtccctgaaagcatatgggctggggttatgtcagtcccgcaggatatctattatctgacgcgtggcgttatggatacagaacaccgaagccaaaattccaatcactttcaccggttggcaacttttataaaaaatggagatattgatagtgcaatagtaagactggttgaaacaattgccagagactttatcgataggcttcccgaagataaaaaagacgcgctgttaaatagcatttatgcgaaagttggctcccgctttggtacaacaactacactcatgtatttgttaacttcacgaatgaatagatcaatagcaatgcaccctaaattaaaagcatctttgggtatttttcggggcgcggcgataaactccatattgaccgcaggtgcattggcaaaccactcagcttatgactccagagagctgagagaacaaaacccaagattatattggcgtttacgttctatgggcgaactggacatattgtattttttaattaaagattcagtgtctggctatgtggaggccagcggtatgcaagagcagggacgagatgatgaatacaggaggataatagataatgtcatcaaccaactcaacggttaaaaaaatcttagtcggttttctatattatctttcttatatggcggcaaataccgttgctatgatcgcaatagtattgatggttacatcatttttctattttgaacattggtatgtcgccatattagcttgcgtgggtatttttgcggtttaccactttatattgtatttattcccgcaaagaccagattaataactacttcgcaatatgccccaacgccagatccccaatccactctacatcgccgtcggttagccctagcaactggcggcgttcatattttaccgttggcccgttgcggctgattttatcccgcaggccgtagtgatggactctgaccatatgattaacctgcccgctaaaggtcactgccgcctcgtccgccgtggcttcggttttcataaaacgggcggtgcgcaagcgggtaaacattttgcgcttaatccgcccccgtttgtcgcggcgttttttcttacgcggtaagaacggtgagccgtccgggttctgctgggcctgaatatgctgttgctgtttttcccgcagttgtttggcaacctggcgggtaaaccgggtgcgcccctgtggggaaagttgagccagtaaaatagacagcgtgttatccagctcatgaaaatcactcatcgtgcccactccgcgaccttttcgccctgaatataaatctggtaactatccagcaacgcataaggctctggcggttcatccagatgggtgacgtttaacgcgccgttttcttctttgactatcacccgctcggtgagtttcaactcaatgctgatatccctgacagttttatcaataaaatcaatctcgaaggtaaaaccgtcctgacgcttatcctggctggccatcatgcccggttggtgtttgcgcagccagtgtaagatcgtcaccatcagcaaatccatgtcatggccataatcagtcatcaccagattaagggtgtagcgatattcaaaagacagcgacggggccagcgtggaaacaatcgctccgcgatcgataaacacatgcaggcagtcggggttttgtctgacgtaggcgctggctttcatcaccgcgtcccgcagggagtcaggttttagcatgttattgctccagtttacgtaaaggtttcaggcaaatagtgcgaatatagccctgtaaaccggctatttgctggtcggcggtggcgatgcgttgccggagatcgaaataatgccgttcagcggcgtcagtaagtcggggccgggcagcatcagccacgctgggggcgcgggcggttcgctggctatcgggcaagggacaggcggtgttaaactgcaagcgctgagtaccagcggccacagcacggcgcaaatcgtcaatggtggcttgggcatgagccagttcctcggtgtgttgtttatccagtgcggcgacctgttgttgttgttgccgctgtctggcaatggcgcgattggccgttttcagcgcttgctggttttggcgggcgctatcacgccagctttcggcttgccgctggtagtgtcgggccgtcagagctgaaccacccaatgccagcaataacaccaggccaatcaacaatgttaatcggttaggcatagttcgcgctccgcttcccgccgctccggctgaccggcgcagttattcgcccggatacggcaatctttgccaccgtcaaaaatccatttgctgatttcgtgacaggcacccacgcgatccccggcattcatcttgcggaaaaaggtcgaatgacggcattttccgataccaatgttgtaggcgcaaaagctggccactccggctttttgcggatcactgagcggcaccgtgatgtagcgttcgaccaacgccagtgctttctgagcttcagccagattaaaacggtcacactgcgcagcggtcaatgtcatccccatcacaaccggctttccgtcgataaccgtcaacccccggcaaatcgtgggtgatccgctgccatcccggtaagcattcaggcggttgccttctttctcatccagaaactgagagaaaatcaccaccgaactggctccggccaggatcagcccctgaacggctttactcagtcggctcatgattggctccctgaataagctgttgtcgtttgatttcatagattgcttgctggcgtatatcttcccgccgcttgtaataacggttagtcagataagtgccgacgcccagcaaaataccgataaaggtggcccagtcttgcagcgtccaggcaccaaataaggtcagcacccaggcggccagaaaagaggcccatgacgtgtgtttatccactgttttctccctgggcgcggcgctaatcccaaagttgtaaaagttgtgaggtcgccgctggcgtgatatccggcatcgtgaccgggtagccgtggggcaaaatcggccctctgtctgccaatcccggattcgcggctaacacctgctcggtgacaccggcagtccgcccgtaatagcgccaacacagggcgtctaccgtgtcattttgctgagccagaatgcgcatcagatcaattcgcaggtcatacgattgatagcctgaatatcgttaatcgcccaggccgcatcacggcgcagcgcatcaatggtggtttccagtgaatcggcccgtttactgccggagccggtggcgtcgatactgcgaaaacgctcggttaaactggcctgcatcaggcaatacaccgctcggcggtaaagttggacattgacgctttccccgtctaactggctggccggaacggtcgtcaggctaaaataaccctgtttctgccgggcgcgttgccagtcagccaaacgccgattcgtttcgtggatggcaaaacgtgcagcctcaatcactcgcggctggctcaaagtgccgtcctgtcgcatatcatcccggtatttgttcaggtcgatatccggccagaactcggtgtttttaatcatcgtctggccgctatcactgacgggggatttatccctgtccgggctgggctggagcacaacgttcattgtgatgttctcaagtaagtgggcggtggacggcaaccttgtcagagtaaaaatattctgactcggctaccgtgccgcccccgccgtggcgtttgggttacgcagcctggatcagtttctcaagctgcttgatgtctgtttttacgccgctgttttcatccagccgtagcgcttcgttcaggtttgccagggcgagtacgttgtccccgtcctgccgcaaggcgtagccgacaaacttatgcagccgggctttcaccgcatcgggcatatcccgcccggttaatagttcccgcgcccgcatcagttgggcggtatccagcggcgctttatcggtcaggtcacgttgtgctgcggttgtcagcagctcggccaccagacaggcggtggtgcggctgaaatcttccggcgtcaccaaatcatggcgtaaggcgtattcagcaatatccagcccgctggcaatatcgcccacgtccatatgccaaatcagcatgcgcattaacaccgcgtcctgtccgccatgacctttcgccagcacaccggcgacccacggttgataggtcggcaacatgcgccgcttcacctcggctttacccagatgagactccaccttgtgaagctggcccatatcctgccgcagcttgaacagcagcagatcgtaagtgctggcgtggttcaggctggcggcttcgctcaacgaatcagactgttgagccgccacaaatagccggtgccgacgggcggggttggtcatgatggattactcccccgttggtgcgtctggaatgaccggcgcggagaaatcaccgagctgaatgttttcaatcagcgcaacacagccgaaatcttcaatcacataggcttcattgaccgattcgaagttttccacccggtcacgtttcgggttgtcgataatggcgcggcggcgggtgccgtcttgccagtaaatagacaggttatccaaacgggtgatcagaatggtgtcgggcgggaagtgtggtgcgcgcacagccggtaaaccgccaatacgtttctgactgataatcaggtctgcggccatcgtttcgctgttgggctggatctggttaacgatcgggaaatacttgtcggccagcagggaacggccgcaaatagccaccagttcggtgtcgtcctggaaccagctttcaaccagctcattgacggctgacatcaccagcgcatccatgttgttatagtcaccgcctttaccgatgcggattttagccgataccactttgccgtcctcatccacaattttatccatcacatgctccggcgcatcttcccggacggcctgcaaccagccacggttaacgtcttgcaataagggattttcggttggatctgaggttttcgctcgcgctttgccgttaaagccgatcatgatgcggtcgagtgcctggcgtttaacgatagagtcgcggatacggatttggaagtcggggaacttggcccacatatccagcttggcgtaaggcaaggcggtatcaaagttagtctggccgcacttgtagccattgctatcaagactggttggatcggtcggttcacgctctttttcatgggtattggtggtgctggcaatcgggcgctcaatacctaaaccgattttatcgccttccttttcatccaccggataaacgttgattttggacagaaaggtgctgctttcctgttgtttggtttccagcttctgcgccaccgaaggctcaacggtaaatttggcctcgacgtcagtcacatcactcaacgcattcagagcagccacttgctggacgaactgcttatatttactgcgggtcgtatttttcatgggaaattaactccttaacaatcggtcagcagggcgttttcgttacccgtcgccgcaggtcgctggctaaattggcgatcggttttgccgagttgggttttcagttcggtcagtgcctgttgggtggcggcatggtcagctttcaacgcggtgaaagcggtttccagtgtgctcaacgccgtgagtttttcttccagttgctgcgccactaattccaccgcctgatgcacatcactgaagcgagcgtcatccgtggtctgttttttggtgaacatggctttgatttggctaaacagcgccggtttctgctcggtttcagtctcgaattccagcgtgatttcatcggccacgctgaaaatggcgtcggcctggcttttacgtgaagccaacgggttattggcgctttgggcgcagaaggtcaggatttccgcccccagtgacgccggggtatcggtaaaggcgatgccggtcagataggctttgccggtgtctgcgaatttctccacgtactcaatgctggagtacaccttctggcgggactcgcgcagcttgaccaaatcgtccgtcgcatccacttgcaccagtagcgccaatttgcccttaagtgggccgtctttgatttcttcatatttggcggcggtaatatcgccgtaagcgcggaatgggctgtcgggcagcacacttttaatgtgctccagattggcgcgggcgccgcgaaacgtcgggttatagctttcagccatttcaacaatgtgctgacggggaataaggcgcccgtcgctggttgcaccctcgacaacggcgcggaaaaacttggatttaggcatggcatgaattccggtttgggatggtatggccttatgttggcaaccggcgtcaaacggaacaatgaagcgctgttgtgtcagggctggcacaaggcgtaatacgagatggaggcgtagcggataggtagccttgcggcatgaaaggttactgcacaggcagattgaatatggatagtgtcactatcaatgccgatttagatccccgccgtcaagccaagtatctgtactggcaagggctgaggattgcccgcattgcggagatgatcggtgagaaggctgtcacggtacacagttggaagcgccgcgacaagtgggacgattacggcccattggatcagatgcaactgaccacggcagcggagtattgccgattggtcatgaagccggtgaaagaggcaaaagactacaaagaaatcgacttgttggcgcgtcaggccgaacggcacgcccgtatcggtaaatataacaacggtggcaatgaggcggtgctcaatcccaatcttgaaaaccgtaacagtgggccacgcaaggcagcggaaaagaacagctttagcccggagcaggccagcaagctgaaagatatttttcttgaatccatgtttgactatcagcgtggctggtatcaggccggtttatcgaaagagtttcgtatccgcaacctgctcaaatcccgccagattggggcaacctacttcttcgcctgggaagccttgctggatgccatcgaaaccggccgcaatcagatgtttgtttccgcctccaaagcccaggcgcaccaatttaaaaactacatcgtagccgccgcccgtcaggtagaggtagacctgcgcggggaagtgattattttgcctaacggagcagaaatgcacttcttaggcaccaactccagcaccgcccaggggcgtccgggcaatctgtatctggatgagtatttttggatacccggcttcagtaaattgcgccgcgccgcttccggtatggcttcacagaagaaataccgctcgacctatttctccacgccctccaccaccactcacgaagcctataaattctggaatggcaccctgtttaacaaagggaaagcccgagaccggcagcgggaaattgacgtgacctattcccgcctcgccgggggcaagctgtgtgaggataaacagtaccggcagatcgtcaatattgaagacgccgaacgcggcggctgcaatctgtttgatattgatgagctacgtaatgaaaacagtgatgaagattttgacaacctgttcatgtgcaactttatcgacgataccgcctcggtattttccatgcaggaaatgcagcgctgcatggtggatagctgggaagtgtggaaagacgtaggtttgttatccctgcgcccctttggtgagcgtccggtatggattggttacgacccggccagcaccggcgacagtgccgggtgcgcggtagttgcgccgccattggtgccgggcggtaaattccgcgtactggagcgccaccagtggaaaggaatggatttcgcggtgcaggcggccaatatcaaggcgctgaccgatcgctataacgtgacctatatcggcattgatgataccggactgggccgatccgtcacccagctagtgcgccagttcttcccggcggttcgcgccattcactacagcgtcgagatgaaaaccgacctgatttataaagccaaaaacgtcattaccaccgggcggctggagtttgacgccggttgtctggatatcgctaccgcttttatgtctgtgcgcaaagccatgacacccagcggcaggcaggccacctatgtgaccgatcgggctgaaggcaccagccacggcgatgtagcctgggccattatgcacactctgtttaatgaacccctcgaagggattaacggtaataacaccagtatcatggagatattttaatgcgtcagcgcaaccgcaataagcaatcagggcaagctactgccgcacgaggacagaacgacggccagcgagccgaggcgtttacttttggcgatcccattccgatgctggatcagcgggatattctggattatctggaatgttcgcaggtcgatcgctggtacgagccgccggtgtcttttaatggtctggcgaaatctttccgcgccgccgttcaccacagttcgcctatctacatgaagcgcaatgtgctggttagtctgtttgagccgcacccgctgttatccaaacaggattttagccgctacgcgctggattttttggtgtttgccaattcatttttggaagcccgctataaccggctgggcggattaatgaaactcacacccagcccagctaaatacacccgccggggtctggacactgacacttattggtatgtgcaatcctggacggaaccgtaccagtttgagccgggtcatgtgtttcatctgcttgacccggatattaatcaggaaatttacggcgtgccggaatatctggcctcgttaaattcgacctggcttaatgaggccgccaccttattccgccgcaaatattatctgaacggcagtcacgccggttttattctgtatatgaacgatgccgcccataaacaggaggatatcgacaagctgcgcaacgccctgaaagaatccaaagggccgggaaacttccgcaatctgtttatgtatgcgcctgccggtaaaaaagacggtttgcaggttatcccactcgccgaagtcgcggccaaagacgaatttatgaatattaaaaacgtcacccgcgacgaccagctcgccgcccagcgtgtgccaccgcagctcatgggtatcctccccaacaataccggcggattcggcgacgtagaaaaagccgcgcgggtatttgccatcaacgaactggctccgctacaggagcggctcagtgaactcaatgagtgggttggggaggaggtgataaggtttaggccttatgagttgttggtttaactatttccagtaggattactatcaccatgtggggctggttctataggtgtgaataaaatagaactggctttgctgtttttattaaaatgctcaacaaattccttgcagttatgtatgcaaacaaatgacgccacacatctaaaaacaaacaacatgcttagccccataatacatatgtttattataatttttagcagattaagtatatgttctgaggatttcaggttaattccagagacactgggcattgtattttcagtaatatcaagaaacaagaagccccacaatgaaacaagtgataaataacatataaacaatagtgcttgccataagattctttttataaaactatcaaatttctttgcgaatctggcgacgcctaagtcatctatataacaagtattgacgaagcgcttactattttcaaatagaaatatagagtacccagagttattcgagcgtaatagaagatctatctctcggtagccaacattcatacatttagttttatagaaaaatactctttcaactaaatatctgcttccgtgacttttatttttataagcattaatcaaatcctcatcaaacttatacttgtctcgaaaaatgctacggcggtatgcaaggaaagaaactaaagttgttaataataccccaatgaaactatatgtataatctggcatgacttaaagctcacttatattcaacgtgatatatttacaatatgcaatcattcaatatttaactatattgtgattgctataaatccttcggtgaccaataatttatagataagtcacaacacattttatattcctatcgtgacatgtcacaagcctcttgattttgtttttgtgccgtgtcacgattttaaaagagcaagccgcaacggtcagcgtaggattaactgataattgctcaaatcattacccaaataccccacaacaacactgcaagcctatagcgcaacaatccgcataactctattcactacccaatcaccctgaaaaccacaccaggcaaggcctcccctcacttttcgaaatgcataaaaagcgaatttttagtcatgcaaagcgggggcgagggggtgacgcggaaagagggcttgccgctgtactttcatatccgcaatgcccgcagaaatacccaccagaaagccagtgcttaccaccgccttctctgcatcaaaacgacacgatccgacggacaacaaaaaagtgcctgacagcgtgggctgtaggcgctctggtggctggctttcttgcggtcaatttatctcaccacatgtacgccattcatttttatgcatattcattcattttgatagccagctaactcccttcgtgctatcgtaaaagcatccgcgctacaggctggataacatcagatgtttatacccctttgtctgccaacattccgaatcgccctgcaagcaacacccgtctttctcgcccggtaaagtatccccgcagcgcttacaactacttttcttcagttcggccagttgcttgtgcaatagcttattgtcctggcgaatcaagccaatcagatattcggtaatgtcgtaaggctggcgagctatgcggcgctgctcgcatccctccagcagcatagccaactcctgcgcatccaaacgcagggtaacggtagttattcctaacgctttatcgcgcagacgctgtgcgcgtttgcggtcgcttgctgtagtcattttttctatcctttcacaacacgaaagccgactaagagcgaattatcatcataatccgcccctaccacgccaccctcaaccagcgcattaataacgccgatcatgccgactcgtatcaccccatctattttgccgcacatagccgtactgtcagtggcgaatcggttggagcaagccacacgaatagccgccaaggttgtaatagcatctggatcaagaattaataattcgttaagaatatcaacagctttatttgcattaatcattttcaatctccacgttataacaaataatcatcctggtgcactgccattaactccgacagaatagccaggcgttcggatgcaggtactcattaggtgttcaacaccaatggatttatctatatcggataactaaccatcacccagccaccggcccaaaccacaccggtttatcttggttatcttctgcctctacggtttccaacttacgtttatgctcaccaaccaagcggataaccagcggcacctgttgctcgcgtagccgctcaaatctggctttaatatccgtcgccgaagtcgtcaaattgcgaacgacatacagtgcgccgtccgttctcgcccgataagtcgtaccttcaaccgtaaccgatgctccttttgctatggatttcagcatgttgttatccagagcaataccgatggaatcagcgaaatctttgattaaaaactctttctcgcccagatctgcggccagcatcaattcgccctggctcggctggcggggtttagtgggctttttccgaggttttgcggcttcgcagcgtatccgattaagcatttgccgccgctctttagccgttaatgcatcaaaatcgatgttttcaggcggtggcggcggctcaatgaccaccggtggtgtggtcattttttgtacccccgtacagttattgacagaactccgagagggcgcgggcgcgcccttaacgtcaacagccaaatcaacggcgcgggcggagacaatcgtccagacagttgtacgcgtgatgatgggggtgtctctgccaacgatgggcgaaaacaatcccttgatgcggatcacattttcaaaatagccgttagtcgcttcggtgacttcgtaataggtacgcacaatcaaatcatcgcggcgaacgaatggcccaccttgggcattaacatacccggcccaattaccgttatcagccgcatcatgggcggcggcaaactcaacgctcaaccccacagcctgatcgtgatcggccattcggcgtaattcgcggtaaaccgtcaccggcgcaccaccgataaattgaaactggcggatacgccaacgacttgcccaggcagataccgccggagcaacttcttttagcaacttgccggtatcgtcatcgatttcaccgtccagcgcgtagccgtcgatattcttcgaaatatatttcgcgatataaccggtcgcgctacccttctctggatcgatagcttcggcatgaaaacgggcctttcgggttttttcgctattcagctcgtcgatattttcctcatgagcatgattgcggaaaatcacccgagcctgttcgatatgctccgggcgcataaacagcaacatatgccagtgcggtgtgccatcgtgatgaggttcagccacgcgaataccaaacacgcgaatatcttcccgatgcaattttgcccttacccggctccataccccgcgcaaataacgttgggttctggctgggcttgcaccattccacttacggttacggtgaccgtccttattggtggcatgaaatttagaaggtgcagtcagagtgtaaaattcccctgcgtagcccaactcttcacaaatattttcaaatccgcgaatacgaaccattagctcacagcggcgaattgccgggttagccacactgtgatcgtatttctcgatcagggaaaaacgattcccttgctcgtcctccagttccattgatttaagaaactctcgggtacgccgcttctgctcccgccaatccccaacggtggcagtactggcataaggcgtggtttttttactgacattgccgagggcaatatgtaaatgctctttccacatatctgcatggcggcgcaatcggcgcttccaccaatcctcggatatcatgcgagccacaaatgaagtcaggttttttacgttcagtttccagcgcgccgttagatagatttcccaaccgggaggcgtctgcttaaaagcctgagtcattgctgcggcacgacgataaagggcaaaaaccaccgtaaaatcagacttgccgtcaacttcatcatttatcacgcctaactcacggcgtaattgcagagaaatatctttcgccagcaaatcaatatccgcccgaccggcatccggtagatggctaaaacgggtagcaagtggggctgtgtcgttagcttcggcagatatttgatattgatcacgaaccagatccagacgtggcaatacgcgctcaacaaagtttttcgttaagtgcgtattggctcggcggatgccctggttttgctccagtttattgaggtgcaaacggatgccgcgctgaacaatatgcggctgtttagcaaggagatcttgggcatgaattaatgccgcccgttgttggtctgtctgctcctggttttggggctgtaaataaaccggcccaccaattgcagggcgcggagcattccagggataggcccactcaaatggcactacgccgctacatggaaaaggtaacggcggtgtaggtgcaatgcggccgcgtgagtctcggctcaatccacggcctccagcgtagcaataatctcctgcactttctgacggccatcgcctttgcaactgatagagcgcggcgcggtaatactgtggacggcgaaaagagcgtaaagctcggcagcgcggggagtgtcgctattggaaaccaccaccttgcaaccgttatcagcggtatttaccagcgccaaagctaggcggcgctgatcgtcatcggtaaaaccatcagtgtgatagtgggtaaaatcggccgttttagacgttgggatatacggtggatcgcaataaaccacatcgcctgggactgtcatatttagcgtctcggaaaagtcgcagcataggaacgtggcgttcttggccttttctgcaaagaaacggatctcagcttcggggaagtaaggcgctttatatttaccgtaaggaacattaaaaccgccgctttggttatagcggcacataccattaaaacaatggcgattgagatacagaaatattaccgctctgctgagtgcgtcactgttgccggtattaaaaacattgcggaattcataatattgctcggcggtgttagccgtcataaacaaggacgaggccaggttgattagctcgctcggttctcgtttggcgatgttgtaaaagttaatcaggtcagcattaatatccgttatcaaatattcgtcataatccgtattcagcatgaccgaacaggaaccggcgaacggctcaaccagccgcttaccagcaggtaaatgctggcgcagggtttccataatacgggccttggaaccggcccatttaagcggggagcgatttaattgcattgagcaccgcccgccatagcacgaataatacccaacgtggttttacagtcggaaagcgcacgatgagcagtaccctcaataacaacgccttgctgtttggcggcgttacccagtctctgccatttgtatttatttctcttcttatccctttcgccgaaatattcggcataagcttccatgacgcattcagcttcaagaatatatttcttacctaaaaactgacaattattagctgccgccgtttgaaaaattaaacgggtgtcaaatagcgcattataaataagtagggtacggtcattggtcagcaccataaattgccaatgaatatcacgccatgtcggggcggctgcaaccatttcattcgtgatcccatgaatggcggtggcctcggcggggatagtttttattggcttaacaagcgtatccagcaggatcttaccggtacaatcaataatagttatttctactatttcagcatcatcccctagccctgtagtctctgtatctagaataagacagttattttttagccactttttggctcgatgctgtgcgcctaatttacacagtctattacccagccccttaatccattgacggatggcgcggaaaagtgctttaaatgaatcgcgagcacccatgattttttgaactgatttaatgtcatttttcattatttatttccactcaagatagctgcattggcgttacaagaagagaggttgtcaggaagagcaaaagacagcattaccaacccctgaattgcaaaatcagcttcggtaatatcggtggtcaacaccttaatttcacgccctgtaaattcatccgctccgccatcccattcctttaacagcaaataatcaccaacacggaaaccccggtcatctattcgtagttccgcttttttctttccttcgataactgcatggaaatattcgggcaatattttcaattcatgcgttcttggcgcgtaggtatatgcggtcaccgcctcctgaaatgccgttgcagtgcgtattgcttctttgcgtccagactctgttttatttattgctttaagcgcgttagcggttgtgccgaataaaccagcggtaacgatgtttttacctgcatcagtacccgcaatcgcaaaaatcaatgaatcccatagcggttcaaatgctgaatggaaatactccaaatacccaacgcgctgatttaactgctttatcttctgttgctgactgctttcaatacagctaaggcgctctatttctgatgcggcagaggttaagtggcctatagcgtgttttgccatagcagataacaacggatgcaactcatgaggaaatgattgaattgcattgattacgcaggtaattcctttaattgaatcgatggttttggtattagtcataatttcagcctcgtttttaggtaataaaaagcccgacgcaataaagcgcctgtaaatttcaggtgttaatcaggttcgatttaaatcaggtaataggatcgcaatctatataagtgattctttccggtaataaactggctgacgctcgccagcggtttaaggcatcgacaatatttctttgttcgtctggtcgtaaatctgaaaatttattgttatgtctggctctctctatgcctgccagataataaatagcacctttcatcttcgggtctgtctcacccatttcagtaataagcgcgggaataagccctttatgttttggattagggaataagcaccaaatttcagcagtatgtttaaggccgttctgacgttcttctaatgtcagcggtaaagcccgtacctgttcggtgttagccataaccaatccttacgtgaaaatacccattaaacgagcaaaccaacggcgctttgctccgggcttggcaataaatggtgtgcggcaacctttaacgaactgcatttcgctggctttgggttgtgacttcgatgggttttggtataacaccgcaattacactgagtgaccagcaattccaacgcctgagcgctagtttggtctccagatgattgtgcggtacttaacagcccctccaagccgacactcaggcgaaaggcgtaatcattaagcgaaaacattcgcacctcgtcggcaacagcggaagcgatacgcaggttttcggccttgaagtggtattgctgcaacaactcattgatcaatatgaaataggcttgcttcatttcttatcctttaaagttgctggtacgttttgcgttcggtttcttttttgttgattatgcggctacggtgatcgtgaataaccgcacgggctgaaagaaaggcaatccaaacgagtgctgccaataaggctattgctccgctggttaattcggctaattggccgggcatgtctcgacctcatcgttaaatggttgcggggcaatgccggacgttttgaattcttgcagggccgcactgagctgatgaaaagcgtttaattcagagccgcataactgccaggctatcgttgtgatcatggttaatcctgcaatggcattacaggtgataacttctttttcacgtgcacgaagatgaggattaaacgagaaagcttcgcctttatctgatgcacagagatttaactcagctatttcagccgtgtaggttcgtaatatggcgttagccaccggtaagcaaatggatttcatgctgcggctcccgttgtgcgttggctatacaaccagtcaatgtattgagtcgccagagattgtgagtagaaatagccaaacgactgatcgcccaacagcacctcatgccgcgcaattgggttaattgccgtactgcggcgataagcgagcacaaacgagcgataaccttttgagtttttgctgattgggattatggcgtagctcatattggctctcccagccctaaccacatcaaccacccgtcacgaatttctttaggacggctatcaaaagctaacttcattcccttgttccaggctggcaaataaacccatgattcggcgcgtgctgcagggttctctgggtttttcatttccacgacgggcaacttacctttctcaatcatacccttcaccgcttccggtgatttgccgatcaatcgagcaaattccgggtaactaatggcatctgacatgcttacgatttctttgctcatctgctaacctctacgattgtgcaattaattgcttatagttgcttttagttgcctatggtggcgacaagtacgccttacgatagtgccaatattatacgatggtataaacatgtcaatagacgtatcagagaaagtaaagctaattagagagtcagaaaggataaacagaaaagaattcagtgagttaactggtgttaactatgcgactttgtctagctatgaaaatggtgctaagggaatgagcttagaaatgacaatgaggatcttgaatcatccccgatttaaaaaatacacactctggtttatgaccgatcagattgcccctgaatccgggcaaattgcaccggctctcgcacactatgggcgagacagcgaaacctctccgcaatcggaaaatggggctggctaactctttataagatattcattttcgaagataaatttcaaaacgactactacatcggggagttttcttatgtcgattaagaagctcgatgatggtcaatatattgtggacattaggccggctggtcgcgacggaaagcggattaggcggacattcagtaaaaagcacgaagcactggcgtttgagaaatatgtggttgttaattaccacgaaaaggattggctatctaaacctgcagataagcggcctctttcagaactgactgcattgtggtggctatatcatggtcagagcatggattatgggaagaaatataaagcccagttggcaaaggtcgccaagattatggccgatccctgcgcttttcagattgataaaagcgccattgccaaataccgagcgataagacttgcggagggcgtaaaggcatccagcgttaacagagatttgattgttttgggaggaatgtttactgcgctgattaatgcggggatgtatcacggcgaacatcctttgagagggatcggtaaattaaaagccaagcaaacagcaatggccttcctatcgcagggggaaattgcgttattgctcgaccgactgaatgaagataatcgtcggattgctgttttatgtctgagtactggggcgcgctggggagaggctacgcgcttgagggcggagcatgtagtaaataatcgagtgacgtttgttgagacgaaaaatggcaaatcacgctctgttcctatatcgcaggacgtagctgacaatctgatttcaaaaaaatcaggcttgctgttcggcgaagcggcatacccgatcttttgccaagaactccggtcagtgaaggtagacttgccgcacggccaggcaacgcatgttttacgtcatacctttgcgacacattttatgatgaatggcgggaacattattacgctacagcgaatattaggtcactcgacaattcagcagacaatggcatatgcgcatttttcacccgactacttgcaggatgctatttcgttcaatccattaagaggaaaagcaacgatttagtgtccacggattgtccacacttgggtcgcttttagatgcttttagaggcttgtagtgctggctaaatgattgattccccgtaccacaccagtgggacggggatatcataaggctcctacaggagcctttaagcaaatacaaacggaacgctattacagtacgtcgaccgcgttcagttctttgaatgccagttccagacgagtaatcattgaagtctgggcagcacggagccatacgcgtggatcgtagtatttcttgttaggtttgtctgcgccttctgggttacccagctgagcttgcagatagccttcgttctttttgtaatactgcaggataccgtcccatgttgcccactgggtatcggtatcgatgttcattttcactacgccgtagctgaccgcttctttgatttcttctgcagtagaacctgaaccgccgtggaatacgaagtccaggctgttgtgtggcaggccatgttttttagaaacataatcctgagaatcacgcagaatagttggggtcagtttaacgttgcctggcttgtaaacaccgtgaacgttgccgaaagaggcagcgatggtgaagcgtgggctgattgcgttcagtttttcgtaagcgtaatcaacgtcttctggctgagtgtacagagcagaagcatccatgtgactgttgtccacaccgtcttcttcaccgccggtacaacccagttcgatttccagagtcataccgattttcgccatgcgagtcaggtatttgctacagatttcgatgttttcttccagagactcttcagacaggtcgatcatatgagaagagaacagtggtttgccggtagccgcgaagtgtttctcacccgcgtccaataggccgtctaaccatggcagcaatttcttggcacagtggtcggtatgcagaatcacaggaacgccgtaatgctcagccatctgatgtacatggtgtgcaccagagattgcgcccagaattgcagcaccttgtggaacatcagttttcacgcctttacccgcgatgaacgcagcgccgccgttagagaactgaacgataactggtgcacgcactttcgccgctgtttccagcacggcgttaatggagtcagtacccacgcagtttactgctggcagagcaaagttgttttctttagctactgcgaacactttctgcacgtcatcacctgtgatgacacctggttttacgaaatcaaaaattttagacatgttacgttgtcctgtttcgtcggccgaagataaatggaatcggtttcgctgattaacctgtcggcggctaccgacagcagcgaaatagcgaaacgggcggctttcgccccccgtcatctaaattactgcttagcgcgctcttccagcatcactactgctggcagttttttgccctccacgaattcgaggaatgcaccaccgccggtagagatgtaagagatttggtcagcaataccgaacagatcgattgctgccagagtgtcgccaccgccagcgatagagaatgcttcgctctcagcgatggcgcgagccacgatctcggttcctttacggaagttagggaactcgaacacgccaaccggaccattccacagaatggttttggcgtttttcagaatctcggccagacgttcagcggacacgtcgcccagatccaggatttgttcatcgtctttgatttcagttgctggtttcagcgtcgcggtcgcagtttcagagaactcggtcgctacgcgtacatcggtaggaaccgggatattgcaggtttccaacagacgtttggcttctgggatcaaatcagcttcgtacagggatttacctacgttgttgccttgagcagccacgaaggtgttcgcgataccgccacccacaatcagctggtcagcaattttagacagcgcgcccaatacagtcagtttggtagaaactttagaaccgccaacgatagccaccatcggacgagctgggttacccagcgctttacccagtgcttccagttcagctgacagcagcggaccggcacaggcgataggcgcaaatttaccaacgccgtgagtagaagcctgtgcacggtgagcggtgccgaaggcatccatcacgtaaacgtcacacagggcggcgtattttttagacagggtttcgtcgtctttcttctcgcctttgttaaagcgaacgttttccagaaccaccagctcaccggcagccacttcaacgccatccaggtaatctttagccaaacgtaccggagaagacaatttgtctttcaggtagttaactaccggcaacagagagaactcttcgttgtactcgccttcggtcggacgacccaggtgagaggtaaccattactttagcgccttgcttcagcgccgcttcgatagtcggcagggatgcacggatacgcgcatcggaagtcactttgccatcttttaccggaacattgagatccgcacggatcagcacgcgtttgccagctagatccagatcggtcatcttaattacagacatggtgaatcctctcgttgattctctttaaagttgcttatcagtaggtcaactcagggtaatcccttgaattaacccgccgtattagaaaccgctgtcggccattgccaatgtcgtatccaacattctattggcaaagccccattcgttatcgcaccacaccagagtcttaatcaggtgctgcccactgacccgtgtttgggtgccatcaacgatagcactgtgcggatcgtggttaaaatcggtcgacaccaatggtaattccgtatagtcaactataccacgaaatgaacccattgccgccttttgcaaaagctggttgacctcagtcaccttcaccgaactgctcacactgacgctcagatcgatcgccgttacgttgatcgtcggcactcgcaccgatatcgcttcaaacctgtcgcagaacttcggaaaaatacgggtaatgcccgcagccagcttggtatcaaccggaataatcgattgactggcggctcgggtgcgccgtaaatcctgatgataggcatcaataaccggctgatcgttcatcgaagaatggatggtagtgacagtgccggattcgatgccgtaagcctcgtccaacagtttaataacgggaatgatacagttggtagtgcaagacgcgttggaaacaatccgatgctctgcgcgcagatcctgatggtttacaccatagaccacggtggcatccaaatcatggctacccggatgagcaaacagtacctttttggcaccagaggccaaatgcgcctcgccatcttctcgggaaccgtacacgccgctgcaatccaaaactacatcgactcccagctcatgccaaggtaactgcgctatttctggctgatgtaccagccggataacatcgtccccaacgtagagcttgtcacattcctgacgaacatcccaagcgaaacggccatggctggaatcatatttaagcagatgagccatgccttccgcgtttgccagttcattaatggcaaccactgaaatttctgcccgacggcccgactcatacagcgcacgcaatacactacgaccaatacgcccaaagccatttatcgctatgcggattgtcatgttactccctgttttatggttatcttcatgcaaccccatagagtactgtagcacgtggcctgatattcatcgttttatcacatttcagataatcatgctgtcggcattatgcaaattattcccgacaggccttgataatgaatcacaactgaaacgcttcagccagaataaaccaaacgaggtacaaagggaatatcttgctgataaagggcacatatccccccttttctggcgaaaaacaggcaaaaaaaaggccgcagaagcgaccttttaacatcgatattaccgagggataccttcccttttacaccttgagaacagcgtctgttatttcaacagcgcctgagctttcgctactacgttctcaacggtgaagccgaactctttaaacagcagatctgctggagcagattccccgaagctggtcataccaacgacagcgccgttcaggccgacgtatttgtaccagtaatccgcaataccggcttctaccgcaacgcgagcgctaaccgccgctggcaggacagattcacggtaagccgcgtcttgcttatcaaacgcatcggtagatggcatagaaacaacgcgaactttacggcctgcggcagtcagttgatccgctgcggcaaccgccagttcaacttcagaaccggtcgcgatgaagataagttcaggctgaccagcgcagtctttcaggatataaccacctttggcgatgttagccaactgtgctgcatcacgcggctgctgagccaggttttgacgggagaagatcagtgcgcttgggccgtctttacgctccagagcgtactgccaggctaccgctgactcgacctgatcgcatggacgccatgtgctcatgtttggcgttacgcgcaggcttgccatttgctcaaccggctgatgggtcgggccgtcttcacccagaccgatagagtcatgggtataaacgaagatgctgcggattttcatcagagcagccatgcgcactgcgttacgtgcgtattccacgaacatcaggaaagttgcgccgtaagggataaagccgccgtgcagagcaataccgttcatgatggcggacataccgaattcgcgcacaccgtaatggatgtagttaccggcgatatcatcgttcagagccttagagccagaccacatggtcaagttacttggtgccaggtcagcagagccgcccaggaactcaggtaacactttaccgaaagcttcaagcgcattttgtgatgctttacggctagcgatattggctgggtttgcctgcaattgctcgatgaatttcttggattcagtttcccagttagctggcagctcaccgcttacgcgacgtttgaactcggcagccagttctgggtaggctttctcataggccgcaaacttctcgttccaggcagcctctttcgctttgcccgcctctttagcatcccaggccgcgtagatatcttgtggaatttcaaaggcagggtatttccagcccagcgcgtcacgagttgcagccacttccgcagcgcccaaaggcgcgccgtgggaatcatgggtgcccgctttgtttggtgaaccgaaaccgataacggttttgcacatcaacaatgaaggcttatcggtaactttacgtgcttcttcgattgccgctttgatggagtcagggttatgaccgtctacatgacgaaccacatgccagccgtaagcttcgaaacgcgctgcggtatcatcggtgaaccagccttcaacatgaccatcaatggagatgccgttgtcatcgtagaatgcagtcagtttgcccaatttcatggtgccggccagagagcacacttcgtgagaaatgccttccatcatgcagccgtcacccataaaggcgtaggtgtggtggtcaacaatatcgtgacctgggcggttgaactgcgcgcctagagtacgttcggcaatggcaaaaccaacggcgttagcaataccctgacccagagggccggtcgtggtttctacaccttcggtgtagccatattccgggtggcccggagttttagaatgtaactgacggaagtttttcagctcttccatcggcaagtcgtaaccggtgaggtgcaacaagctgtagatcaacatggagccgtggccgttagacagcacaaagcggtcgcggtcagcccagtgtgggttagttggattatggttcaggtaatcacgccacaggacttcggcaatatctgccatacccataggggctccggggtggccggaattcgctttctgcacggcgtccatgctaagggcgcggatcgcgttggcaagctctttacgagaggtcatgttttactccaggtcggatttaaaaagcgttcaagtctatcattttctcagactagacattgaaacggcaatcactaaaaacaaatgaaggcaacttccatgacggcacagccgaatttgctggattttcagaataaagctatagctctatcgctgattgcacgttaccttcgctaccttcaggtagctatatcaagcgtcagtattgcgagctagggtagtggaagccgcactgatgcaacagctattaatgcaattgctgtaatgtagcaatgaacccagattaattgaactgtctaactatattgattgaaacgtaaaactatattgattgaaactgaattgattagaacggattaaaccttaaaaattattgaacggcaaaaccatgctgaacagcataataatgcataactacaggaaataaggcgttatgaacattcgtacttcgttgatggctttgagtatcaccgcgctgctaagtgggtgtcagaatatgaacaccgaaggcctgatgcaatctggcgcacaggcgtttcaggctgcaacgctaagtgataccgatgtcagaacgctcagcgataaatcctgtgcagaaatggatcaaaaggcgcaaatcgcgccagctgacagcgaatacagcaagcgtctggcaaaaatttccgcagccctcggcgacaatatcaatggaacaccagccaactataaggtttatgtgaccaaagacgtcaatgcctgggcgatggcgaacggttgtattcgcgtatacagcggcctgatggatatgatgactgacaacgaagtggaaggggttttgggccacgaaatgggccacgtcgctttagggcatacccgtaaagccatgcaggttgcttatggcaccatcgccctgcgtaccgcagcgtcttccgctggcggtattgccacttccctgtctcagtcccaacttgcggatattggagaaaaactggtgaacgcccagttctcgcagaaacaagaaagtgaagccgatgattattcctttgaactgctgaaaaaacgcggtatcgatccgaacggtttggtcaccagtttcgaaaaactggcaaaaatggaaggtgggcgaggcagcagcctgtttgacgatcacccggcttctcaggcacgcgccgatcatattcgtgagcgtattaccagcggccagtaagctaattggtatcaatcatttctactacgcccgtaaatcgcgggcgttttttcttctttcaattttcatcgactggtttatatcaactaacttttatcgattaattttcatcgatttccacctgaatctgcccaccgtcaatccgcaccggataagtttgtagatcgcgatctcccggctcacgtagacatttcccgcttctcacgtcaaacaccgccccgtgtaacaggcactcaatagtgccctcatcaaaaaatcccggactgagtaacgcatttgcgtgagggcaaatatcatccatcgcaaaatattcgccatcaataatataaatcccaattcgtttatcccccacgctggcggagaacggcgaatctggtttgacgtaagacactttgcacacattcagccagctcatgttatcgctccatttattctcaggaagcccatttcaaggggtacagttcggcttatcgatcttagtgtggtcgattttgcgcataacggaggaaaatggttgttcgcagcagagaatagatatggaggggaaacaataagggcagaccgaagtctgcccttaagataatgcctgacaagccagttaactgggactcaccttcaagaattactcgtcttcgagataagtgtagccatacagaccggattcaaactcttccaggaactgggcttgcagttctggggccaaatcggtttctttgacctgatcgcggaagtgattcagcagtttttccgggtctagctgcacgtaagccagcatatctgccacggtgtcgccttcgtcggtttgttccacgttcacggtgccatcaggataaacatagacatcaactgcggccgtatcaccgaacaggttgtgcatgttgcccagaatttcctgataagcgcccaccataaagaagcccagcgctggcgggttttccggatcgtacggaggcattggcaacgtggtagccacaccgtcgccgtccacgtaatgatcgatagtaccgtctgaatcacaggtgatatccagcaacaccgcacgacgctccggtggcttatccaaaccttctagcggcagaaccgggaacagttgatcaataccccaggcgtctggcatcgactggaacagcgagaagttgacgtacagtttgtccgccatacgttcttgcagctcgtcgataatcggacggtgtgcgcgattgctcggatccaactgttcctgaatcatattgcagatagtcaggtactgttgttcagcccaggcgcgctgcgtcagatccagcatgccgtgcgcgtattgggtatgcacatcgtgcaaatccatctggctatcgtgcagccattcacgcagagaacgacggctttctggtttctgcatttcctgccaagtatcccacaggctttccagtgcgcgtggcgcatcttcggccggtgcctgaggttcactgaattcattgcgttccacgccgataacgttggaaaccagcacggtatgatgcgcggtaaccgcacgaccagactcagtaatcaccgttggatgcggcaaaccgtgttcattacaggcatcgccgataccccaaatcacgttgttggcgtattcgttcaaaccgtagttcacagagcaatcggactgagaacgcgttccttcgtaatccacgcccaaaccgccgcccacatcgaagcactggatgtttacgcccagcttatgcagttcgacgtagaagcgagcagattcacgcacgccggttgagatatcgcggatattggaaagctgcgaccccaaatggaagtgcaacagttgcaggctatccagactgttagcttcacgcagcatttctaccagttgcagaacctgagttgcggataaaccgaatttggatttctcaccgccgctggcctgccatttacctgacccctgagacgccagacgagcgcgaacacctaggcgcggcaccacgtccagacgtgctgcttcttccagtaccattttgatttctgacatcttttcgatgaccagatacactttatggcccagtttttcgccggtcagtgccagacggatatattcacggtctttgtaaccattacagacaatcacggagcgagtcatgccagcgtgagccagtaccgccatcatttctgctttggagccggcttccagacccaaaggttcaccggaattcaccagcgattctatcacccggcggtgctggttaaccttaatcgggtaaaccaggaagtagttgccttgatagccaaattcgttacgcgcacgctcaaacgctgcgttaatggaacgcaggcggtgctgtaaaatctgtgggaaacagaacaaagccggtaaacgctgcccgcgctgttcttgcatatccttgaccagttgcgccagatcgacacgtgcctgggggacgtccggatcagggcaaacgctgatatggcctaattcattgacgtcaaagtagttcccgccccagtaggcgacgttataagtgcgcagcatcttgctggcattacgatcattcatggcaacctcctgcatggagcgtaaagaaacatgtgcgcccgcagtagacggacggccaatcaagttatcatcagacataattcgcctctattgcgatactgacgataaagtcagtcactatcgcagctacaacctgcaaggacaacccgtgtgcgcaccctttaggaggaataatacgctaataaagcgccgcacgaccgcgagttatcactcagataattgtaaaacacgtttaaatgtaaaatacgtttaacgacacatacgtattgagatttcgtgaatcggatgcagcccaaatctgaaaaacagacggctggcgaaccggattcagtacttcaggcgaccgttaacctgcccgcgaatcctgagtggcacccatatgggtgtaacatcgggttgatggtatacaagaaaggaaggttgcaaggggggattgaacgtcagaacgacgcagctgttgatgtgcagcaaccagtagacaacggatcattaatccaaccacctccacgcatgtcgttcacgattgaacgaacaagacttattaataaacaagataaagtaacagtttgatgacgccgctgataatgccaatgtcgctgacaggattttcaccgccaactctcgccattaaacaatgagccaatgccattctatgccatcttcatcattgcgtatcaaataagctgcgcgcgcagtttatacctagaacagagagaaaatgcaaaatgaaaatggccgaacaactgtttcaataggtaaaaaatttgccgccaaagctcactaagcgttatctgatgttaaaaagggctggtaatgaagctgaaaggtgacctaaaatagacgtccagatgttaatccgtccatactacaaatatggaataggattataggccgctacaggctctgtttttttaatgactgcttgaggctttgcctaaggggggcgttacaggacgccagagtcaggaagcgagcgtattgatatgcaccaccgactcgcccctcaatgctatgcagtgatttttcatccgaataccaaggtaaagaataaaatggctaaacaccttttcacatcagaatccgtctccgaaggacatcctgataaaattgccgaccagatttccgacgccgtacttgacgcaattctggagcaagatcctaaggcgcgagtcgcctgtgagacctatgtcaaaaccggcatggtcatggttggtggtgaaatcaccaccagcgcatgggtagatattgaagaaattacgcgtaataccatccgtgagattggttacgttaattccgaaatgggttttgatgcgaattcttgtgccgttctgagcgctatcggtaagcaatcccctgatatcaatcagggcgttgaccgtgccgatccgttggagcaaggcgctggcgatcagggcctgatgtttggctacgccagtaacgaaaccgatgtactgatgccagcacctattacttacgcgcaccgtttggttcagcgtcagtctgaagtgcgtaaaaacggtacgctgccttggctgcgtccagatgcaaaaagccaggtgactttccaatacgaagacaacaaaattgtcggaattgatgcggttgtcctgtctactcagcattctgaagacatcgcgcaaaaagacctgcaagaagcggttatggaagaaatcatcaagccggttctccctgctgaatggctttctgcgaataccaaattcttcatcaacccaaccggccgttttgtcatcggtggcccaatgggcgactgcggtctgaccggtcgtaaaattatcgttgatacttacggcggcatggctcgtcacggtggcggtgcattctctggtaaagatccgtccaaagttgaccgttcagcggcatacgctgcgcgttatgtagcgaaaaacatcgttgctgccggcctggccgatcgctgcgaaattcaggtttcttacgctatcggcgtagcagaaccgacttccatcatggtggaaacctttggtacagagaaagtggctccagagcaactgactctgctggttcgcgagttcttcgacctgcgtccatacggcctgattaagatgctggatctgctgaaaccaatctaccgtgaaaccgcatcctatggtcactttggccgtgagcacttcccttgggaagcgaccgacaaagccgaactgctgcgtgatgcggctggcctgaaataagtttcagacctttcgcgcatcaagttaaaaccccggtttccggggttttttatgcctgacgatgggctctgactcgttcagtcaggctaaaaatcatcattcccaccaccatcgccaatgcgaagatcatgccctttcccacaccggcaccgactaataccagcgcagggccagggcaaatacccgctaatccccaaccaaccccaaatagcaggctgccaccaatcaagcgccgatcgatttgcgttgccgtcggcaactgcatcgggagccccaacagacttacagagcgcttacgagtcaggaaaaaggctaatgtgcctaccagaatggctccggccatcaccagccctaaagacggatcccacaggccgctaatatcgagaaaaccaagcactttagccggatttgccatacctgcgacaatcagtcccagcccaaaaatcagtccggccaatagagaaaagaactgtttcattttcctgccttatctataccaatacgtggcgaattagccacaccgtgaaaaaaccgcccagcatgaaactcaaggtcgccgccagcgaacgcagggaaaaacgcgataagccacagacgccatggccgctggtgcagcccgaaccatagcgggtgccgataccaaccaataaccccgcggctaccagtgttccgatatcggcatcaatccgaatcgctggcaaaggtaaaaacaaggcataaactaacggggaagcaatcaggccaatcaggaacgccaatcgccaactgatatccccctttttccctgctaataagccgccaaaaataccactgatccccgtaatttttccgttgaatacccaaaataacgccacggagcagcctaatattattcctcccgccgcagccgaatacggtgtaaaattcatccaatcaatgttcatgaatcccctctccttcttttggacagtaaagctcatatagcgtgtgtaaaatcgccagaatccgtcgatctgcgatggagtaataaatacgtttcccttcccttcgcgtcgtcaccagcccttcgtttctcaaagccccaagctgctgggaaagggtcggttgatgaatattcagcaaggtttccagctcaccgacggatttttccccctgactgatttggcacagcaataacaaacggtcttcatttgccagcatacgcaaggtaccgcaggcttcagccgctcccatgctcatcagattcagactcaatgtgtctttgctactcatgttacgccctgcaatttcgccattcattatataaaaacatataatataattatataatgtgtaattcgtgcgctcaaggctgaacgggtcgcttgcatctgcgtttccgtcacactattcttccgctctatgagctcacaaagaattcctatcgccctgcaacaaggggttatgcagtgtctacgccagaagctgcaacttgccaaccagcatctgggaacccaacatccagagccaaaaatcaactattaccaacgcggtactagcgccggtagcgcttacctacaatcctgggaaattcgcctgaatccggtattactgttggaaaacaaacagacatttatcgacgaagtggtgcctcatgaactggctcacttactggtatttcgtcggtttggccgcgttgcgccacacggtaaagagtggcgctggatgatggaaagcgtgctgcaagtccccgccagccgcacgcataagtttgaaatcgcctcggtgcagagcaaaaccttcccctatcgctgtgcctgccaactgcaccaactgacggtgcgccgccacaatcgggtgctacgcggagagagtgaatatcgctgccgtcactgcggtgaaaaactgcaatatacgactacagaaacatcttagttattggattaactgtataaaaaaccagatctttgtttgcctgagccgataactttctataacctgcgttcttttccatatttaggtcgttttggaacatgttacgcaaaattctattggttctggtttgctcttccccgctattctcatccgtcagttatagccaaaatatcaacaacttctcgcatgccaaagccgcagctgccaagatccatcaagacgctcccggtagtttttactgtggctgccagattcagtggcaaggcaaaaaagggcttcccgatctaaacagctgcggctatcaggtacgaaaaaacgcacaacgggccgagcgtatcgagtgggaacatgtggttccggcctggcaatttgggcaccagcgtcaatgctggcaaaatggcggccgtaaaaactgcaataaagatgcagtctatcgtcaaattgaaaccgacctgcacaatttgcagccagccattggcgaagtgaatggagaccggaataacttcatgtacagtcaatggaaaggcggcgaaggtcaatatggtcaatgtgcgatgaaggttgatttcaagaataagcaggcagaaccaccggcgcgtgcgcgcggtgctattgcccgtacctacttctatatgcgcgatcaatatcagcttcgcctgtccagccagcagaccaggctgtttgaggtttgggatcgccaatatccggttgataattgggaatgcctgcgtgacgagcgtattgcaaaagtacagggcaatcataacccttatgtacaacaagcttgccagcggcaaaaaagctaacctactatattggctgatatccccattggccgatatccccgccactctgttattctgcgggcagccttttatttcgcgtcgttaaccaacgaacggcgcggtgaaattttcgttacggaaacaagagcaaatccatgcgtatacctcgcatttatcatcagcagccgctgtcggctcattctgaactggctctcagcgatgacgccgccaatcacgtaggccgcgtgttacgcatgagcgaagggcaaaacctgcagcttttcgacggtagcaatcagatattcagcgcggaaatcattcgcgtggataaaaaaagcgttcaggttcgcctcggcgacgccgtggttgaagatcgggaatcccccctgaatttgcatctcgggcaggttatttctcgcggcgaaaagatggagtttactatccagaaatccatcgaattgggtgtgaacgtcattacgcctctgttttcagagcgttgcggagtcaagctggacggcgagcgtttggctaagaaaattcaacaatggcaaaaaatcgcaatcgccgcctgcgaacagtgcggtcgcaacactctgccggaaatccgtgaagctatgcagttagaggcctggtgcgccgaacaggatgatagcctgaagctaaatctgcacccgcgagccagcaatagcattaatacgctgccgctgccggtggataaagtccgcctgttaatcggcccggaaggtggtttaaccgccgccgaaattgagatgacctcacaccacggatttactgatatcctgctggggccacgcgttttgcgtacagaaacgacagcgctcaccgcaatcactgccttacaagtgcgtttcggcgatctgggttaaaggagaaaataatgatcaagctcggcatcgtgatggaccctatctcatccatcaatatcaaaaaagacaccagttttgccatgctgatggaagcacagcgccgcggttacgaattgcattatatggagatgaacgacctttatctccacgctggtgaaggccgcgcccgcactcgcttgctgaacgtaaaagaagataaaaaccagtggttcagcttcggcagcgagcaagatctgacgttgcacgatctcgacgttatcctgatgcgtaaagatccgccgtttgataccgaatatatttacgccacttatattctggaacgcgctgagatcaaaggcacgctggtcgtcaataaaccgcaaagcctgcgtgactgtaacgaaaaactgtttaccgcctggttcccggagttaaccccggatacgctggttagccggagcaaagagcatatccgcacattccaccagaagcacggtgacattattttgaaaccgctggatggcatgggcggcgcgtctatcttccgcgtgaaacaggacgatcctaacctgtcggtgattatcgaaaccctgaccgagcacggcagtcgtttctgcatggcacaaaacttcctgccagctattaccgaaggcgacaaacgcattttggtcgtggacggcgaaccggtgccttactgtctggcgcgcattccggcacagggtgaaacccgtggcaatctggccgccggtggccgaggtgaagcccgcccactgagcgaaagcgactggaaaattgctcgtgcggttgctcctacgttgaaagaaaaggggctgatctttgttggtctggacatcattggcgatcgtttgactgaaattaacgtcaccagcccaacctgcgctcgcgagatcgaagccgcgttccctcaagtatccgttaccggtatgttgatggatgccatcgaaaaacgcctggctgataaaaaagcctgattctacttggggttgcggcttcaacggcagcaccccatcattttattactttcatccgcaaattgcggctgtttatcttttacttcagctagttacctataaaacataatgaatttacagcatcacttccttattgctatgccttcactacaggaccctcagtttaagcgctcggtggtatatatttgcgagcacaatgaagaaggtgccatgggtttggttatcaataaacctgtggaaaaattcactgtggaatccgtgctgaataaactaaaaatcaccccttctccgcgcgatcctgccatacggttggataagccggtgcttgccggcggccctttagctgacgatcgcggttttatcctgcattcaccgcagccaggctttggctccagcgtgcgcatttcgccggaaaccatgatcaccacatcaaaagacgtgctggcgacattaggtacgccggaacagccgaaaaatgtgctggtggctctgggttatgccggttggcaaaaaggccagttggagcaggaactgctggataattcctggttaaccatcgaggccgatctcgatatcattttccatacgcctattgccgaacgatggcagcaagcagccaataaactgggcatcaatattttcaatatcgcccctcaagcaggacacgcctgatggctaaccgcaccattctcgcctttgattttggcaccaaaagtatcggcgttgctatcggtcaggaaattaccggtacggctcgcgcactgacctctttcaaagcgcaggacggcacgccagactggcagaaagtcgagaaattgttgaaagaatggcagccagatctggtggtggtagggctgcctttaaatatggatggcaccgaacagcctttgaccgccagagcgcgcaaatttgccaatcggctgcatggccgttttggtgtacctattgctttacacgacgaacgactgagcacagtagaagccagagcctatctgttcgacagcggcggctatcgtgctttagacaaaggcagcgtagacgctgcctcggcggtgattattctggagagctggttcgagcaacagcccgagtaatatcttggcaagatcatatcataaatgccctgagccaaggcttggggtcgccagcccatactttccccgcaaaacagatagcacattgatttaaaatcactttaccatgataaacaccgctatctgcggcagaatgctgccaatttacccctattgagctaagcacgcggtacaatagggcttggcgaatagttttagctgacatagtatgctgccccgcgatgatatcggcggatgaaattgggcaacggcggccttgattactatgcttagcctctattgtctcgatgccggaaccgccaagttgcgcaacggccaacgccgccgtctctgtagagatttatttaactctgacagattgatggcgcagaatatcgctcatccttagagggtgttttttacatttattgaggttttctcatgacaaaagtgactgttgctgcaacacaaatggcctgttcttgggacctgccgaagaacatcgaaaatgccgagaaactggtgcgacaagctcacgccaaaggcgcgcagatcatcctgattcaggagcttttcgctgcaccttatttctgtattgatcaaagccctgagcactatgcgctggcccaagagctggacaatagcccgctaattcaacatttctccaagctggccgccgagctggaagtggtattgccactgagcttcttcgaacgcgccaacaacgcttactataactctctggtgatgatcgatgccgatggctcggtgctggatgtttatcgtaaaacccatattccaaacggcccggcctatcaggaaaaacaattctttattcccggcgacaccggttttaaagtctggcaaacccgttatgccaaagtcggcgtaggtatttgctgggatcaatggttcccggaaaccgctcgcagcctcgctctgcaaggcgcagaagtgatcttctatccaaccgcgattggttcagaaccggctttcccagaaatcgacagccagccacactggactcgcgtacagcaaggccacgccgcagccaacctggttccggttatcgcttccaaccgcatcggtaccgaagccagtcaatatatcgatggtctggaaatgactttctacggttcttctttcatcgccgaccaaaccggcgctttagtggctcaggctaacaaaaccgacgaaaccgtattagtacatgaatttgatttgcaggaaatcgctgcacaacgcgcttcatggggcctgttccgcgaccgtcgtcctgaaatgtatcaggcactggcgacttctgacggcaaaacccggagataatcatggcgttgcaaacaactcctcggcaggacggtttctatatgcctgccgaatgggcacctcaagacgcagtctggatgctatggccttaccgtcaggataactggcgcggtaaaggtattcctgcccaacaaacttttgccaaggttgctgaagctattgctcgcgccacgccggtatacatgggcgtaccggccaaatttatggagcaggcgaaagccactatgccagccaatatcacattggttgaaatggagtgtgacgacgcctggatgcgcgataccggcccaactatggttatcaatggtaaaggcgaacgtcgtggcgttgactggaaattcaacgcctggggcggattactgggcggtctgtacgccgattggcgacaggacgaaaaagtcgccgaacaggtgaaccagtttcataaaaacctcagctatgccgctccgttgattctggaaggcggttcaattcataccgatggcgaaggcacactgctaaccaccgcggaatgtttattgaatccaaaccgcaacccagacctgaaccaagaacaaatcgaagcattactgcgggaatatctgggtgtaacccactttatctggctgcaagacggcgtatataacgatgaaaccgacggtcacatcgacaatatgtgctgctttgtacgccccggcgaagtggcgttgcactggaccgacgaccagcaggatccgcagtacgcccgatccgtggccgcttacgaagtactatcgcaagcggtggatgccaaaggccgtaagctgaaagtctggaagcttcctgcgcccggcccgctgtacaacaccgaagaagagactgccgacgtgctgtcaaccgatgcggtgcctcgtactgccggtgaacgtctggcaggttcttacgtcaactatctgatcagcaaccagcaaaccattttcccaatgctggatagccgtaccgatgatttggccaaagatctgttgcaacaaatgtatcctgactacgccattattggcgttccagccagagagattttgttgggcggcggcaatatccactgcattacccagcagattcctaagccttaatctgtacgtcatcagcccggaacttatatccgggctgatattccccgcatacccccgttgattctcctgacaaattccccgctcccaagagtctccattgctggacgtccctcttcgttgcttatgttttctctttccctctttcttttcttttgccttttgccttttgccttttgccttttgccttttgccttttgccttttaatgctgcgtccaacgttgttcttcggccagagccaatacgccctgattttgacgctgtactaaaccttgctcaaaagtttgcattcccatcgctccaccggtttgcatcaaactggttagctgatgagtttttccttcccggatcagatggctgactgcaccggtttgtaccatggtttcaaatatagccactcgccctccacctcgttttggcaacagcttttgcgcaattacggccatcaggctccccgccagctgactgcgtacactgcccttgtcttccgccggaaatgcgtcaaccagtcgatcaacagcctgcgccgccgtgcgggtatgcaaggttcctaacactaagtgtccggtttctgctgcggtcagcgccagcgtaatgctttctctgtccctcaattcccccagcaaaatgatatccggatcctgccttagcgctgccttaagccccgcactaaaagacggcatgtgctcgcctagttctcgctgctgaatcaagcatccctgactgtgatgaataaattcgataggatcttccagcgtaatgatgtgtcgccctcccatacggttaatcccgtcgagcattcctgccagcgtggtggatttcccactgccagtcgctccggttatcaatatcaaaccgctttcacagggtaataaatgatgcacgacctccggtgcatccaactcggccaaagtgggacattgggcggaaatcaaacggaaagcggcggaaagcccacgttgctgttgaaagaaatgcccacgcagccgcgttccacaagataatgaaaatgaaaaatcaatctgcccatgccgttgtaatttctcataatgcacctcatctaacagttgtcggcttaaattctgtatccatgtcgatgtaacctgcgcgacctgcctgaatatatgcaagtcaccgcaaattcgtaacgcgggatgatagccagtacacaggtgcagatcggaggcattatgctttacactagccgccacccattcattgaaatccatatcaaactcccggggtcatatgagcactatccaacagaacctacaggatgtcaggaaccggatcgccgctgctgcaaggaattgcgaacgctccccagaagaaattacgctgcttgcagtcagtaaaaccaaacctgtggccgcgatcgaagaagccattgccgccgggcaacacgcctttggtgaaaactacgttcaggaaggggtggataaaatccactatttcgccgggaatcccgagttggaatggcactttattggcccgctgcaatccaataaaagccgtctggtagcggaaaattttgcctggtgccataccgttgacaggctcaaaattgccaagcgcctgagtgaacaacgcccggcggacatgcctgcactgaatgttctgattcaggtcaatatcagcgatgagcaaagcaaatccggcattcagctcgccgaactccctgagttggccgccagtatttatggtttaccaaacttgaaattacggggtttgatggcaattccagcgccagaaagcgattttgaacgtcagcttgccgtttttcagcagatgaatcaggctttcttaaccttaaaacagcgctaccctgaaatagatacgctttctatgggtatgaccgacgatatggctgccgccatcagcgctggtagcaacttggtgcgcatcggcactgccatttttggcgctcgcgactatggttccaccgcgccagcgcaggcttaatcgaggatatttatgcaacatcgcaaaattacatttatcggcgcgggcaatatggcgcgcgcaattatcgcgggtctggttgcaggcgggtatccggctaaattaatcagcgtctgcgctccttcagccacccatcgtgatgctctggcgcaggaatttggcgtaatcagtagcagtgataacgtggctcagactcgtgaagccgaagtagtggtactttcggtgaaaccgcaaatgatggccgatgtctgcaagccattgagtgagcaggtagatttcggtaagaaactggtattatccatcgcggccggcatcagcgtttcgcgtttttacgctttgctgggagacaagctgaatctggtgcgaattatgcctaatacgccctctctggtaggaaaaggcatgagcgggctttatgcgccggagcaggttaaccaggccgatcgcgattttacctctcaattaatgggttcagtcggtaaagtgtgttgggtcaacgatgaaagcggcattaatcaggttattgccgccgcaggcagtgcgccagcctatttcttcttgtttatggaagcaatgcagcaagaagcggaacgtttagggtttgatagcgaaaccgcacgcctgctggtacagcaagcggcttctggcgctacagcgctagtcgaggccaacccgcagctaccgctatcgactttgcgcgagcaggtcacttcgaaaggtggcaccacggcggaagcgctgcgcgtatttaatgagcaacatttgtcggatattgtttcccatgccatgcaggccgcaatcagccgcgcccaggagatggagaaactgttttaatccatccaatggctgataagactgatttacaaaacaatacgctccccctaagcctttatcattaagatagaggtactttacagacacttgaatatgattaaggactaaaggcaaccatgctaacgctgacttttttggctaaaaccgtcattgacctttacgtcatggtgctgctattacgcatctggatgcaaatggtacacagtgacttttacaacccgttttcgcagttcgtggtgaaaatcactcagccgatcgttggcccgctgcgacgaattattccgtcattaggcccgatagatagcgcttctctgctgttggccttcctgttgatgaccatcaaatacccgctattactgctgattcagggcggcggcatgtccctcagcccttataacctgctgtttggcgtaatttcactggttaaggccgccggttatctgatcttctgggtgatgattatccgtgcattgatgagttgggttagccagggccgaagcccgatggactatctgctatatcaactgaccgagccgctgatggcaccgatccgccgtattctgccagcaatgggcgggatcgatttttccggcatggtagttatcctgatcctgtatctgatcaattatttaggtatggatctgttaggcgagctctggttcgtactgtgagtgcagtcactcccctgctggacgggctggcgatcaggctatatattcagccgaaagccagccgcgatcagattatcggtttacatggcgatgagttaaaagtcgccattaccgccccgccggttgatgggcaggccaacgcccatttgatcaaatttatagccaaacagtttcgagtggccaaaagccacgtcatcatcgaaaaaggtgagctggggcggcataaacagatcaaaattattcatccgcagcagattccacctcaggttgcagcactgctcgaatagtcggataactccgctgctccattttgaatggcacgaaataaattcaatcaatggcacaaaaccatcaggtttatctcacgatggaaagcaggttaccggcgtaacaatcaatcaggatttaccatgcaaaaagtcgttttagctaccggtaacgccggtaaagtacgtgagttagccagcctgctggcggatttcggtctggacgtggttgcgcaaaccgagatgggcgttgagtctgcggaagaaaccggtttaacctttatcgaaaatgccattctgaaagctcgtcatgcggcacaggtcacaggattgcccgccattgccgatgattctggtctggccgtcgatgcgctgagcggcgctccgggcatttattcggcgcgctatgctggtgttgatgccagcgatagggaaaacctggagaaactgttggtaagcctacagaatgtgcctgaaggacaacgcggtgcgcagttccattgtgttctggtgtatatgcgtcacgccgaagatcctacgcctctggtgttccacggcagttggcctggcgtgattgcacgggcagcatccggcgcaggtggctttggctacgatcctattttttacgtaccggaattaggcaaaacagccgcagaactgagccgcgaagaaaaacaggcagtatcgcatcgcggtaaggccttgaaattaatgctggatgccctgcgaaatgcttaagttgccaccgcttagtctttatatccatattccgtggtgcgtacagaaatgtccttattgcgattttaactcccatgcgttgaaaggagatgttcctcatcaggaatatgtcgatcacttgctggccgatttggacgccgatctgccgctgaccagcggacgagaaatcggcaccatttttatcggcggcggtacgcccagtttactgagtgcagaagcgatgcaaagtctgctggacggcgttagagcacgcctgccggttgcagcagatgccgaaatcaccatggaagccaatcccggcaccgttgaggccgatcgcttcagcggctaccagcgggccggtgtcaatcgcatctctatcggcgtgcagagctttaacgagcagaaattagtgcgtctggggcggatacacggcccagaagaggctaaacgcgctgcggcgctggcaacctctttgggtttacgtagctttaatctggatttgatgcatggattgccggatcaaatgctggaagaggcgctggacgatttacgtcaggccatcgcactaaacccccctcatttatcctggtaccagctaactatcgaacccaataccggtttcagctcgcgtccgcccaagttgccggatgatgatgcgctgtgggatattttcgagcaaggtcaccagttgcttagcgctgcgggttatcagcagtatgaaacctcggcctacgcaaagcccggttaccagtgccagcacaaccttaattattggcgctttggcgactatctgggcattggctgcggcgctcacggaaaagtgacttttagcgatggtcgcattcttcgcacggtgaaaaccaagcatccacgcggtttcatgcaaggcaaatatatggacaggcaacatgaggttgaaatagccgaccggccgtttgaattcttcatgaaccgtttccgtctattggaagccgcgccgcgcggtgatttctataattttaccggtctggaagaaagcaccattcgctcgcagctggatcaggctatcgccaaaggctatatgctggaaaccgatgaacactggcagattaccgaaaaaggaaagctattcctgaattcattgctggaactgtttttatagttgtcagagcgcatcgtaaaaaaacgggcattcgcccgttttttattttatcggatggaactcaatttaaggctttgagcagctcaatacgctgttgctctagcgtggtcacccgaccgcaaacttcatggccgaagttctggaaatcttgttcctgattgttccattcagtctgaatcgcttgctgcaacccccccagattgcccattatcgcctgcaatggattattggaagaaccgctcgtcgcctgcttaacgcccatttcattcaggctatcctgcaaaacgccccccagactctgttgcacgatggcgcgaccgtccttctctacttgggcaatggcctgatggtggaaagtcagaccgtcgctgcgtttctcaatgatgcggctcatttgctgtttcagctgatcgttcaacgtcgtcagccggttacgcacattactgctgctccccaactgttgcacaatgacgttatccaaagaaacccgggctttttccagatgctgttgcgcgcctttatcaatccacggcaaatctttacgcaatgcgctctgatagctgaacgctttctgccgctgagcctctgtgagagtcaatgttttgccgttgcgaatcacatcaccatccggtgagatttgcagatttccgctggctcccacaacctgtacgctctgcggactgataatcacatcatcctgaggttttacgttgcactgatattctgcgtgaacctgtcccgcagccaataacaaaagcgccagtcctgcttttcgtaacatagattctcctgagaaaccgtttatctaccgctaattatgacactgcctgagttttatcgccgccagtagtggactgatcctaaaagattgagcgaccaatccgctgggcaagtaactctaaggcagcggttccggccaatgagttccctgagacatccagttccggtgaccataccgcaatgcacatctcatcaggcaccacggcaataattccgccgccgacaccggatttccccggcatacccacgcggaatgcaaactcgccggcaccgtcatacataccgctggttatcattaacgcattgatttgtctggcttgaatcggtgaaataatctgttcggcatgattgattggccgcccctgatttgccagataaacaaaacagcgagccagctcgatgcagctcatacgcatggcgcaataatggaagtaagtttgcagcacggtcaaaacatcgttgtcaaaattgccaaaagatttcatcagataagcgatggccgcattgcgatccgaatgttcaaattcagaacgtgccacccggctgtcatagccgatagagacatcatcgaccaactggcgcaccacttccagcatccgctgcttaggcgcactcaggcgactttgaagcatgtcgcaaatcaccagcgcccccggattaataaagggattacgtggcttcccttgctccaactccagctgtaccaatgagttaaacggctggcccgatggctcttttcccactcgccgccacacttcatcctcgccgtagcgccctaaagccagagtcaggctgagcactttagaaatcgactggattgagaaacgctcttccgcatcacccgcctgaaaaatctgaccatcgacgccgcaaaccgcaatacccagcttatctgcggaaacttccgccagggctggaatatagttagcgactttcccttgcccaatcatcggtctaacctgatcgaggatatcttccaacagcgtattcgataacgtctttaccacggaaatactccagtactttccccaataaaaataaaggcgcctatagcggcgcccttattatcaaacagtggtcagatcgttaggatcaatcccaccagatatcaaacagctcgctggtttctacgtttttcattttacgagcttccagccatttgctgaccaatgcacggtgctcatcggtgcaatgaccgatttcctgcaggcagattaggccttcccactgcatgtagccactaccgtcgaaagccaaaccgtttggttcaataacttcgtcgataaatgcgtctacggtggaatcgatcacatcaacgccagtgccttcagggaaggtccactgaacggagaaacctaattcctgaaactcatcgatgtgcattttcttgcgtaaacgacgactgcgattgttagccattattctttcctctcaaacatcagatcccaaacgccatgtcccagacgctggccacgtaattcaaatttcgtcaacggacgtgaatccggacgaggaacatagtcattggtttcggaaagattacggtatccggagacggccgacatcacttccaacatatgttccgcataaggttgccaatcggtggccatatggaatacgccgccgacttttaatttactttttaccagttccacaaacggagtctggacaatacgacgcttattgtggcgcgccttatgccatgggtcggggaagaatagctgaaccatatccagcgaaccttccgggatcatgttttccagtacttcaaccgcatcgtgacacatcacgcgcaaattgttcagttccgcttcatgagcgctgcccaaacaggcgccaacgcccggcgagtgaacttcgatacctaaaaagttctgctgcggattattggctgccatggtgaccaaagaggtacccataccgaaaccaatttccaatactgtcggcgcttcacggccaaacagcgtgctcagctcaaccggggtcgtttgatattctacgcccatcaccggccagtagttatccagcgcaaactgttggcccttggttaagcgcccttgccggcggacaaaactacgaatacggcgcagtgcgcgaccgttttcatcaaactccggagatatgacgtcatttatcatggtgctttctgtctgttgagttgcgcaaaataagaacgcgcattatgcaaagatacgctagtttatcaactatgaacgcgagaagtacaaatttaaccacgaaatgattcattattaccgacgaaacttcgccaacccctcggaaagttccggtttacagccttcagactctatgctgcaatcccagccctaaattatttctctgccggatatcgatacttacctatgatgcaagcgcaacagttcgcgcaagtggtgcttgactggtaccaaagctacggtcgcaaaaccctaccgtggcaacgggacaagacaccttaccaagtatggctatcggaagtgatgttgcaacaaactcaggttgccaccgtcattccttacttccaacgctttatgacgcgtttccccgatgtgcgggcgctggctgctgcgccattggatgaagtattgcacctgtggacaggtttgggttactacgctcgcgctcgtaatcttcacaaggcggcgcagaccattgtggccaaacatcagggtgaattccctaccacttttgaagaaattgccgatttgcccggaattggccgctctaccgcaggcgctattttgtcgctggcgctggggcagcatttcccgatcctcgacggtaacgtgaaacgggttctggctcgctgctatgcggtagatggctggccggggaaaaaagacgtggaaaaacggctatggcaaatcagcgaagacgtcacgccagctaagggcgtgggccagtttaaccaggcgatgatggaccttggagcgatggtttgtactcgttccaagccgaagtgcgaactttgtccgctaaacgctggctgtattgcatacgccaaccatagctggccacaatatccggggaaaaaaccgaaacaaaccataccggaaaaaaccgcgtatttcttattgattcaaaatcatacgcaggtttggctcgagcagcgccctcccgttgggctgtggggcggattattctgcttcccgcagtttagtgaaagagaagatctcagtcactggttgcagcaaaaagggctaccagagcaaggtttgcagcagctaaccgcttttcgtcacacctttagccacttccatttggatatcgtgccgatatggatgaatgcggtaaccctgagtggatgcatggatgaaggagcgggtctctggtataacttagcacagccaccgtcggtagggcttgctgcgcccgttgagcgcctgttgcagcagttggccaagcagcctcctacccaagcagctttatttggcgatagtgccacaaatgaggatttagcatgagcagaacgattttttgcacatttttacaaaaggatgctgaagggcaggatttccagctctatccgggtgaagttggcaaacgcatttataacgaaatctcaaaagaagcctggtcacagtggatcactaaacaaaccatgctgattaatgagaaaaaactcagcatgatgaatgtggaagaccgcaaattactggaacaggaaatgattaacttcctgttcgaagggcaggatgttcacatcgaagggtataccccgccgagtaagtaacgccaaagggccagtcatggccctgatgttattcctcatcacgatatggcttgtaagatgaagaaaattttagctttgctagtgattgccccattattagtttcctgctcgggcaataaagatcaggccaataatgaagcctttatcaaagacaccaatgggttcgaaatcttaatgggccaatttgcccacaatatcgaaaacatttggggtttgagtgaagttttgatcgccggtccgaaagactacgtaaaatataccgatcaataccaaacccgtagccacatcaactttgatgccggtaccattacggtagaaaccatcgcaacaaccgatcctgccgctcacctgcgtcaggcgattatcacgactttattaatgggtgatgatcccggttcgatcgacctttattccgatgttaacgacatccagatcagtaaagagccgttcctttacggtcaggtgttggataacaatggtcagccaattcgttgggaatggcgggccgcgcattttgcagattacctgttacaaaccagaatgaaaaaacggacttccggtctgcatgtcatctggtcggttacgctgcaactagtgccaaaccacttagacaaacgagcccacaaatatctgccgctggttcgacgttcggcggaaaaatatggcgtggaagaatcgcttatattggcgattatgcaaacggaatctagcttcaacccttatgcggtcagcggttctgatgctctgggtctgatgcaggtagtacagcacaccgccggtaaagacgtattcagattgaaagggaaaagcgggcagccaagccgtagctatttattcgatcctgaaaacaacatcgatgcaggtacggcttatctgtctattctgcaaaatagctatctcggcggcatccagaatgccaccgcccgtcgttatgcggtaattaccgcctataacggtggcgcaggtagcgtattacgcgtattccatagcgataagaatcgggcgttctccattatcaacagcatggcaccgggtgatgtattccaaacgctaaccaccaaacacccggcagcggaatctcgccgttatctggtaaaagtaaacagcgctcagaagagctatcgccgatattaatttagctttattcctaaataaccggtaaaaatggcacagttttctgtgccattttttttattctcagaaagcaccaataccactctttgccagacagaaattgtgttcattatcacagtgcacgcaagaacaatgggaaataaaccacggcagcctatagtaaaagctcctcccttcttattactcagactgaacaaatggatcttggatttacgctattcgaattagcagccatatttgccaccatggttgtcgcctacattatctttggcctgaccgggttcggctccgcacttattgctagcccggttttagcactttttatcccagtcgcaaaaattgtccctctattggcaatagtagatatgttcgctgccgttactaacgtcgccagacacagtaggaatgccgatcttggtgagcttaagcgactgatacccatgatgattatcggcagcttaattggcgctacaattttactcaaaacccgtccggacattcttttattagccttagggatatttgtcattctttacgcgctctattctttgagtcgacgtaaacctctggggaaattcaaaacggcggcagccgtgccttttggcttagtcggcggcgtgtttagtgcgctatttggcagcggcgggtttatctatgccatttatttatctggtcgaatagaaagcaaagataacctgcgcatcacccaaacaacattgataggtttgagcaccttcacccgcgttattttatttacgctggccggtgtttatatggatttatcgatcttattgatggtgttgctgttagccccaggtatgctggcaggcttaaccctcgctaataggatcagtttaggtatcaaccgcgagcagctaataaaactaataaatatcctgttactgttatctggtctggttctgttaggtcgctatttcagccaataatatgcatctccagataccaccggctaacccggtggtatcagaaaaaaatcagtctgcgatgacgtaccccaaaatacgtcgccactcaacgtcacccttttcgatatatacgccctgtaattccggtgagaatcccggtaataggttaattccctcttccagtgcgaggaaatagcgctgagcggcaccaccccatacttcaccgggaacgacgcaaagtacgcccggaggataaggcaaagcgccttctgcggcgattcgcccttcagcttccgctatcggaattagctcaatattatctcggataaactgaatattggcatcctgcgaattcatgactacctgcggcaagctggctttgcggaacatctctttttgcagctgttttacgtcatgactcacgtataaattgtgcatttcctgacataaacggcgcagagtatatccgcgataacgctgctcattcttccgatataccgtcggcaatacgtcacacagcaatgaatcttgcccaacgtgtcgctcaaactgcgccaacatttctaccagatgagccattttagcgctattttcagccggcgtgagcaagaacaaaattgaattaagatcgcacttctctggcacaatgccattttcccgcaggaagtgagccaaaatagtcgcgggaataccaaactcgctatattggccgctggccacatcaataccaggcgtcgtcagtaataatttgcagggatcgaccagatattgatcgtcggtataaccatcaaagccgtgccatttctctctaggtacaaaatcaaagaaacgggcatcattcgcaattgtctcagtggcatagtcctgccagttcttgccatttatctgtagcgggataaagggttttagcaatgagcaacgttccaatattaattttcgcgcctcgatacccaatctgacacaatccatccacatattgcgaccactggcaccagaatgaattttggcattaacatccaacgcggcaaacagcggataaaatgggctggtagaagcatgcagcataaaagcgttattaaaccgtttatgattacagtgtcgtttctgccctttaatgtgattatcttttttgtgcacctgtgaggtttgggagaaaccagcctgctgtttatggactgactgggtcacaataatccctgggtcatcttcatttaattccagcaacagcggagagcaatctttcagcatcggaataaactgctcatatcctacccacgccgaatcaaacaaaatgtaatcacacagatgaccaatgctgtccacaacctgacgagcgttatagatcgtaccgtcgtaggttcctaattgaatgattgctaatcgaaatggccgagcttcatcggcacgctcaggagcgacttcccgcaactgctgacgtaaataacgttcattgaagcaatgtgcatcaattccgccaataaaaccaaaaggattacgagcggtttctaaatatattggcgtggctccggcctgaatcaacgcaccgtgatggtttgatttatgattattacgatcgaacagcaccaaatctccgcgagttaatagtgcattagccaccactttattagctgcagatgttccgtttagcacaaaataggttttgttagcgttaaacacttttgccgcgtgcttctgcgcatctttggccgcgccttcatggatcaacaaatcgcccaatttgacatcagcattgcacatatcagagcggaaaagcgtttcaccgtaaaattcgtaaaattgccgaccggccggatgtttacggaaaaactcccccccctgatgaccggggcaggcaaaagtcgagtttttcatttcgacgtattttttcagcgttgagaaaaacggcggtaacaggtttttttcatattcagcagcagaggcttcaagttgagcgagataaaaagctttattattttcgcccaaagccattacacctttaatcagtggcaggtaatcaacggacacttgttgatcgccttgcgcagcaataaaagtgggtatcccgaagccctgattatgcaattccgccagaataccgctattgacgtcttccagagaaaccagaatcaccgcgacgtcggtaaagtcagtttcataaagacatactacctcgcgtggggtagccagataggaaaccaaatttgcgcttgctgctattttcaactgtgtcatgttaccgagtctcaaactgtcagggatgagtcgtgccacccaggcacaaagatgaaatcttatgagataaatacacctaataatattccgtaagttgctattgaattagctgaatgactgatgaaccgatgtggagaaaaacacgagcggagcatgatctatctcatttcagctgtaaccaatagacatcagtaaaatcagagaatgaactctagttttaatcatgcctaacagtgagcagaggtagccttaccgcataggagaaacagcagaggaatcatagaagggcaagaaatagtgataggaataaatcattggctgacgggggagattttgcgtcaaaaaaaaagatacaacacttgtcatggacgcccctctttagcctgatttagcgtaataggatatgagtttcgcgcaataattgcatttttattagtgtgactcaagtggtaaatattcactaattgtgaatatttaatccattgttatgcaatcaactagaaattaaggggttatggttcgcaggcgctaaaccacactgtcactgattccctcctcctcatcgggctgtatttcaccttacctgaccgaaaaggcagcaaacgatcgactttatgacagaaactcattgacgatttagtgccaatacggtttaatgcgccccgttgcccggatagctcagtcggtagagcaggggattgaaaatccccgtgtccttggttcgattccgagtccgggcaccatatttagagaaaccagcctacggctggttttttgctttctggcatctggactcttcatcgaacacgttcgattattcgagccaaaggctctcaccccttcggggccgtcgcaagcgacgttcaaagccgcctagcggcgttgtccgagtccgggcaccatatttagagaaaccagcctacggctggttttttgctttctggcatctggactcttcatcgaacacgttcgattattcgagccaaaggctctcacccctgcggggccgtcgcaagcgacgttcaaagccgctgaaacgaaatgtctcgcaaactcagatgtcgtgcaaaacctttattacatctgggtatcgtttcactgcttattctcttaaccacttccccacggcatagtctaataaaaagaatcgcagataaaccatcgccgatgctgtctgactccaaaatgaactgcactcgataaaaagactatcgggctaatgaacatattgagggagagtagcggaatgactcaaataggaaaaatttatgctggcaggttaaatttattcgttacttagatattgataataactctctttcaagatcttttacgtcaataaaaaattaatataactaatacaggatgcttatcatttatttctcaatcaaatttataacccaatgaaaaacagtactaattacattataaaagcagagattgaatgtataaaaaacataagcctatacttcacaataaatacaataagggtgacatgcgtttattatcatacaaaataaaaaagcaccagcaatacaacaaattgtcagaaaaacctcagccataaaaatctgtaggaattttcccacataaattggttcgcttatcctatgtccagccagatatattttctatatcattctctcatcaagtaatagacgcagataaataatgactgccaaattacttttaataaaaggcacgtggaaacctgacgagtataaccgaataacattcgcgaacatagtcactagcccacttcacatatataaagttaaacactcattcctatctaaatacgaatgaatgctaaccgcacatttaattattgtattggagttttaaatgaataagattactttggctatcgcgttattctctgcatccacaaccgtagcaatggcggcgagcaataatacaattacattccaaggggaagtcacagcgcaaacctgttcagtgacagtcaacgggcttgacgcaaacccaatggttttgctgccaacggtatcaagtacagatttagatgcttctggtaaaacagcaggtaagacaacctttactctgggtgttgccggctgtgctccaggggttgatgatattgacatcaaaactgtgtttgtaggtagccaggttactaccgccggtaacctaaaaaatacaggcaccgcaaccaacgttgaacttcaattactgaaagactcaaccacaacaaccggtatcgatctgaatagcggtgtagcacaagatggtatcgtgttaaaagcgggtgatacatcagcagaacatgattttgccgttcaatactatgcaacagggaaaaccaccccaggttcagtcattgcctctgtccaatatgcggtttcttacctgtaaaaaaataagcgtgaccgtataggatatactttaattaactggtgcggcaggtacgctgcaagtaagtaaaatcacccgaggaacttagtaataagttgctcgggtgaatgtatgcagcatatctctgaccacactcggcaaccagggatatagttatttcgcccgcatttagaggatatcctcatggcaattaatatacttggttaccgttacctgtttatcactcttttacttttcataggcatgtctttcgctcaggctagtgtagtcatgaacggtagccggattatttattccgcaggggaaaaagagcacagcgtacaattaaccaataatgatagctttcctaatgccattcaggtttggctagacagcggcgatgcccagtcaacaccagacacaggcaaggctccttttatcgttaccccaccgttctttcgcattgaagctaatgcaggacaaacattgcgcttgaaatataccggcagtggtctgccgacggacagagagtcagtgttctacctgaattttttacaggtgccccccgtcaataaagcagaaaaaaataacaaaatgttagtgctgatgcgtaatcgcattaaagtattttatcggccagaaaatattgcaggccgcgtagatcaggtacccagcgcactcacttttagccttcaccaacgaggcaaggatgtcgttgtcacaggaaagaaccccactggtttctatgccactattgccagcgcggaagtcgttggaagtggtaaaaaacttaatatgaaatcagaaatgattgcgcctatgtctcaagctgagtgggttattccgaattcatcggccccctcaaatgctaccgtaaagttcctactcgtgaatgatttcggtgggcaagataccggcagttataaaattcagtagcatctttccggcgaaggaatatttatggggtttgtacgtgtcagtctaaaaaagaagttctccggccgtaaaaaagcattaactttgtgtattactttaatcttatatgttgatgcgcctttagctcaggaagaaccgcaagacctcgaatttgatgaatctctttttctaggaacaaaattcgcctcaggtttgaatcaactgaataaagagaatgccgtaaccgccggaaattacgatgccgtagatgttctgattaataacaggctatttaaacgtaccactgttaaatttattaaaaatgctgattcgtcagaggcctacccttgcctgaatgatgaattcttaacagccgctggcgttgaactcacggctaaaggcgattccctatcccgacaacccaacacacctgaaatagagtcacgcccttcagattctgcgattccgctgatagaacaatgtgttccactggccgagcgggtcaaaggcgcgtcttttcactttgatcaggcaaaactgcgattagagctatcaattccacaagccttattaaaaaaacggcctcggggatatatagagcggagcgaatgggaagaaggtgaaaatctcttattcgttaattacagctccaacttttatcgcagtgagacaaaatcccaacagcaaaatagcacctctgattatgcttttatgggattaaaaagcgggcttaatttaggattatggcaaatacgccagcaatccaacctgcgctattccaataacagcaacggtagcgatagccaatggaataatattcgtacttatttacaacgccctattccccaattagatagccaattaacgctgggcgaaactttcaccgacagtacgttatttggcaccctgtcatttcgtggagcaaaaatagccaccgatcaacgtatgtggccggaatcaatgcgcggctttgctccagaagtccgtggagttgccagtaccaatgcgcgagtcattattcgccagaatggccgtgaaatttatgaaaccaacgtcgcccccggcccgtttgttattaatgacttatatagcaccaccagccagggtgatctcaacgttgagatcatagaagcgaacggtagccgttcaacatttactgtgccattcagcgccgtacctgattcaatgcgccctggcgtgagccgttatagcgccgttgccggggcatcacgcgactttaccaacattgataactatttcactgattttacctatgaacgcggcctgaccaatcagctaacgggtaactccggtttacgattagcgaaagactacaccgcgctgctggccggaggagtcattggcacttcagtcggcgctttcggcctcaataccactttctctcacgctaaggtcgaaaatgaccaaacccagaatggctggcgtatgcaggcaacgtatagccaaacattcagcgaaaccggaacgaccttttcgttggcgggatatcgctattcaaccaaaggttatcgcgatttaaacgatgtatttggcgttcgttccgtgcaaaagaacggcggaatatgggattcatcaacctataaacaacgcagccaatttaccaccacaatcaatcagaatctggggagtttcggccagctttatgcctctgcctcaaccagcgattattataatgatacgcagagggatacacagttacagctgggttattcaaataactatagggatatcagttataacctggcgattagccggcagcgtagcgtttatacctcgacgctgtatggttgggaaaccgaagatagtaataatacgacgacgacacgctatggtaataccgaaaacatcgcgacattaacgctgtcaattccgctaaatatcggcagcaaaagccaatatctgtcgatgtctgccaaccgtaatccgaaaagcggcaatagctaccagacatcgttatcaggcactgccggtgagcggaattcctttaactattcggttaatgctggctatgacgataataaaatcggcaataactcaaatagttggggagccaatgtgcaacaacaattccctaatgcgaccgtcaacggtagttattcgcgcggcaataattacacccaatatggtgccggtgcgcgcggtgccgcagttattcacggcaaaggcgtaacatttgggccttatttgggtgaaacattcggtttaattgaagcggatggcgcccaaggggcaagcgttcgcaacgcacagggggcccggatcgataataacggcttcgctctggtgccagccttaacgccttataattacaatacgataggtttagataccaaaggcattaatcgtaataccgaactgaaagaaaatcagggtcgcgtggttccttacgccggtgctgcagtgaaagttaaattcgagacactgaccggctatgcgatgttaattcagactcaaaccgccgacggtgaagggttaccgctgggtgccgacgtgtataacagtcaagatgacattgtcggtatggtgggtcagggaaaccagatctatgtccgtgtgaaagacaaaaaaggttcgctgcatgtccgctggggcgaaaacagcggtgatcaatgtgagctaccttatactttcaatgatcaggataccgagcaagatattattcatataacaggcagttgccaccgttaacaattatgagaaaaataatgttaagaccaacaaagcagttaataccttgcgaagtctcacggccaacgtccactgcctgttatcgccgcccgcgtattctggctggtttaataatactgatcgggctaagcagtggttctgcctggtcagcctgctctaaaattaccgcgcaaagtcagctaggtaccggtgatggaacggcgggttcctgggcgggttctctggataacaataatggctcgctgggtttaccaggcattatcgacctcagtaccaatgcaaatttccagccggatggcacattattagcagcggcgacatcaaactttaccacttttgccctgaatactggctatgatcccgaacgagtgctgttccgctgtgatgcagccgacgtagatcagatcttcgaaatgtatgccacaaacggtgataataattatgcgggtaaaaatgaggacggcaccattgctggcaacgttccctctggcttcgccacctatgtacgtaacgttgttatccgtattactaatttatcaactggtgagtattactctagattatggaaaggccgtcgcctgaccgatcttgataaggacagcaccggccgtattctggttaaagcgaagaacttcagcaatatctataccgaactgtttcgcattgattatgcccgaagtggtaccaataacgcggcttcttatacctatgcctacactcagcccaacgcctatattgcctttaaagggccgggtatcaatgggccgattgaaggcactgatgcggtatcaaactggcccggctggtatgcaacctggcctgcgtcaatcggcctgtacaattatgttaccttccgccggacgacgatttgcgccgtgaccaattttacaccaacggtgatattacccagaatttctgtagcagagctgaatagcggcaacaccagttcggcggaatttcacgtggattttcaatgccaaactggcatcacatctggagtgacttctggcgcagttgcgatgggctttttggttcccgcagcaaacgcagcaaaagctcaatcattgggattaatgaatggcagtggcggtatcagccatttgatatcagataattatggtgcatccggaacggccagcggtgtcggtatccgtatttatcgcaacaataacccaattaatctgctatcaaaaaacgtgacattaaccggtaatagcggtggctggtatggcatcttcgacggcgcgcagcaaaccaccggcagtgtaaccggcggaaatagctacactgaaaactttcgggctgagttaggcaagatcagcgggcaaactgttacgccaggagcggtgaatgcacatgcgcaagtggttatccgtgttcaataatatgccattcaaacgcctgactagcggcatcacccgcttacttttgctactaatagtggctcatagcacacccgccgtggccagcgtgatagcggaaagaacgcgcgtgatctttagtgaaggccataccgaagagtcactgcaattggttaacagcaatagctatccagtggcggtgcaggtctgggtagatgatggcgatttaatggcaacgccggagaaagcaatttctcctgtattagtgcttccgccgctgtttcgtctacaacctcaggcgcagcgcagcctgcgactcattttatccggcgtcagtaagttgccgacagatagagagtccgcattttggctcaatgtctacgaaattccgccaaagaccgtcactcaagtcgataacgagtctttcgtgacattggcactacgtatgcaatacaaagtattttatcgccctaagaatatagctgcgccgggagacacgctgagtaaagcattaaccttcacgttagagcgcaacggcgataccgcagtggtcaaagttgataatccgacgccttattatgcatcggtcgcctccctgacattaggctcagcggaaagtctgccggatatggtttccccgtattcaacgctcaactttcctctcaaccgctctccggcagctggcagcactagccttacttttgctttgattgatgattcaggaaacagtaagggttttagcgccaatctaaaataaagcgtgtttctgtagcaagcgcgcggtcggatgctttccctccgcgatttgcatcactcccctcgccgtaatgccacacggactcattccgtaaaaaccctgtagatcagagcgacctaattgttctatttatagaacgtaatgagctattttcgcgtctactccgcttgttgttgtgaatatatagtaattaagtgaaacagctttgctgaaacctaaccgattcggtcgcacctaagtacaacaaaggagaatacgatgtctatcccagctaatttcaatggtcaacgcccagttattgatgtcaacgattccgtgatgctgctgattgatcaccaaagcggcctcttccaaaccgtggccgatatgccaatgccggagctacgcgctcgggctgctgcgctggcaaaaatggcgaccctgtgcaacatgccggtaatcaccacggcttccgttccacaaggtccgaatggcccgttgattccagaaattcatgcaaatgctccgcacgcccaatacgttgcacgtaaaggagaaatcaacgcctgggacaacgaggatttcgttaaagcggtaaaagcaaccggacgcaaaaccctgattatcgcaggcactattaccagcgtttgtatggctttcccgtccattagcgccgtcgccgagggatataaagtgttcgcggtcatcgatgcatcaggcacttacagcaagatggcgcaggaaattacgcttgcccgcatcgttcaggcaggggtagtaccaatggataccgccgccgtggccgcagaacttcagagcacctggaatcgcgcggacgccgaagcatgggcggaggtttacactcagatattcccagcctatcaattgctgattgaaagctatagcaaagctcaggaagtattgaaaagtaacgaaaaactggattctcagcgttaatccgcaggtaatccatagttagacaagcctcggttgaacctgtttcgtaccaacggacaaccgaggcttgaatcgaatagaccagtgccctatcgcccttcttttatcgttccgaatcgttcagccagaaaatcaatcaaggcgcgaatagatggaagcagccctcgccgagaagggaataccgcatgaataatttcccgacatgtcgcccagtcaggtagcagacgaaccaaacggccatgttcaagctgagatcgcaccatcatcgccggaagctgaaccacaccaactccggcaattgccgccttgcataaggtttccatatcggtagagacaaatttaggcacatggtgctgggtggtttgcatcccatcggctcccatcagcgtccaacaatgtttttccatagaagacccgtaaccaagcgttggccacgacgccaaatcaaccggcgtcaacggcataccatatttttccagtaaaatcgggctagcgacaaggtactgagcggcatagcccaaccctcgcataactaaatcagccccatccacaggcaaaggctttaccctgatggccagatctacaccttcagtcagaatatctacggggcgattcatacctaagagctgaatactgacatcggggtattgtaaggagaaatctaccaacatatctcccacataggcatgcaatatagttatcgggcaagccagtcggacggttccgcaaggcacggactgtgctgattcgataatggcctgcgcggcttcagcctcaactagcatagatcgacactgggtgtagtaagcctgccccaattcagtgacggtaaaaatacgggttgaacgtaggataagccgcactcccaaacgttcctccagcataccaatgcgcctgctaagttttgatttgggcatatccagcgcgcgagcagcctgagaaaatccaccgtgctccactacctggacgtagtaatacaggtcattaagatcttgacgcatagaaaatttgtttaaaatacagtgtattagagaaaaaataacgtatagcacacatactgatatttgatttaccgatactgctaaagaatgctgcacacctgtttttctacactccgacttcctatacctctattccttatttattaagaaaagaatataggtggagcacagcattctacttagatcatcaggaagattgggattccgatttatcctctacttcacccgtatgcttgccttcatcggttcctttccaaccatgacgctgaatgagggaaagatgagcgcgttcttcggcaaggctttccgtcagcatttcgctggttcgcttatatgccgcagcgcgagactgggtatcgctctccccttccgccatttcctgtaccatctggagattaaatctgcggaacagatcggcgcgctcccgcgcttcatagcggcccagaccgagtttctccaacgccagacgcccgattttcaacgccccttcaaaggtttcacgctccggttgagcaacgcccgcgtgtttaagctgaatgtaatgctcgacatcccgcgctctagcaatgatttgcaggtttgggaaatgctctttcgccatttccgtaagctgcatactggttgccggatcgtctatggcattgattaacacttccgccttgactgcccctgcggattccagcaaatccatacgtgtcgcatcaccataaaacactttcattccgaatttccgcagggtttcgatatgctcaggatcgtgatcgagtaccactaccttcacgccgctggaaagcagcaagcggcctgctatctgcccgaaacgaccaaatccggcaataatgactcgcgtctgttcttcatcaatttcatcggcttcgcgctccggtccgtggtcggatttctccattcgcgccaacaacactagtaaaatcggcgtcatcgccattgaaagcgccacggccaaagtcaaggatttcacccagtctggctctaacacattcgccatttgcgccgcgccaaaaacaacaaaggcgaattcactcccctgtcccaaaaatacggcaaaccaatagcgctgcttgcgaggaacattaagcggacgcgcaattaaccacaggactgtcgttttgatgatcaggaagcccgccagcaaaacgataatacgcagcggattatcgatcagcgtgccaaagtcgatcgacatcccgacaccgataaaaaataaccccaataacaaacccttaaagggttcaatatcactctcaagcgcgtgtcggtactcagagctcgccagcaacaccccggcgagaaaagcccccatcgccatagataatccgacttcttccagtaatagaccaaagccaaataccagaaatagcgctacggcactgaaaacctcgcgtaaaccagagcgagcaacaaaacgcagagccggacgggtgacataacgccccaacaaaatgaccaacgtaagcgttccggcaactttcagagctgaaaacgcaaaagcagccagagtggtggatgattcgctggcagctaaaagtggaatcatcgcaaccagaggaatcgccgctatatcctgaaataacaatacggaaaaagcgctgcgccccatctgcgaagccattaaatttcgttcattcatcgcctgtatagcaattgccgttgaggagagcgccaatgttagcccaattaaacaggcaatttgccagcgcagacccagcaacatacagaacaacccgataagtgcgccgcaggccaccatctgtaatgctccaccgccaaagacggagacgcgcaaattccacagtcgctgcggatcgagctcaagaccaataataaacagcatcaataccacgccgatttcggcaaaatggagaatactgtcaacatcggtaaccagccgtaatccccacggcccaataatacatccggcgatcagatagcctaataccgaacctaatcccaaacgcaccgcaattggtacgatcaacgccgctgcaccaagataaatcagtgcctgtatgagcatatggctatccataaaacgcctccttccattccatcagacggtgtttgtaatgacgagcctgggcctgaagcgtttcatcatcacaaataaaagtattgtgcatggaaaaaggcggtaaccatttcagaccgcaataaagtgccgtggcctgaaacggctgagcaagcacctcaaagccgggatgactccccatgccaaaatgattttcgccaccgccggtggtgaccgcccacatcagattttttccacgtaacgccgtaccaccgtgaccataagcccaaccatgagccaaaactttgtccatccacagcttaagcagcggcggcatgctgtaccactgcatcggatgctgccagataacgagatcggcacgagacaacgctgcctgctcagcggcgacatcaatattgaaatcgggataaagttggtaaagagagcgaatttctacaccttcgagagtctccgcctgctctatcatgcgtttgttcgcatgagaatgctgcggataaggatgagcatatataattagaatcatgtcttttccaaaaagtattaacgcacttaattattactattaagataacctgttttaccaaaacgctttattcgatattaatatctatttatatcaatcaattacattattgagtttaccctttatcaacaatggcataactgcgagacgcttagattaaaagcgctcacataatcaattataggtatgcctcaccctgattctcttcttcctggcaattgaatctctgcgatatggcattctttagcgatatatccttagtctgttgcacttttccggcgttttctcaggaggccaaaactcctttcgtttagcgaggctaatcagttaatctccgctcaacagacccagtgcattaatatgaagcaggaatgttaatcaccctatttattaacagataaattaaaacaatactaaacagtaaagctaattcttactcataacaatcacaataaaattgaaaaaatgagaaaaatccgagaaaaacaaatagggatgtccaacgaaaatgcaaagctggattgggtaaccaactaatttaatgatgaaaatcaattttgaaaaaaagaaaaatataatacccaagactacaataacaaaagatcaaaaagtactaccagtcacacgttttgttacttcgttcaaaaaataaaactcaagtataatttagcgtgttaattaatcacctcatgaattatcattcttatctaataaatgactcactcatatggagaatgataatgaaggtcttgtttatcgatggagcacaaaagtcattgcattatgataataagaagatcgtgctgacagaaaaggaatttttgatgctacagttcctgctcaatcgcaggaaaaataatagtattcctataaacgaaatcgtcactcacgtttggaaaggtagagagagcattatcggtaaaggtaacgtttcgcagctggcttatcgtttaaggagtaaattatcaaccataggtgatgtcattcagatatccatctcaatgaacaacggcggaaattgcaaagtccagcggaacatcataacaattattgcaagcaataatgggatcatgtgttttctggtcaagttcttactgaacattaaggaaaataattcattataatcaggattaacctcaatataagtagatctgaaactctgacagtataaccaacaggtatataaccaaagataatccagcgtctcaaactggataaactaaaagaatcgtaaataacttgaatagaacagaagcaataatttattatttataaataatcaaaccattgagtatcgaacgacaatgagaaatagcatttaacttatccaaacgaatcgggcaaaacggaaattaattaccacacctctctgttgacttaattctcatttagttcatacgagagatgaaattaactaccatagttgcgagttaaaatgattgattacactgattttcatgattacacagagcggataggtattatcagttagccattaacagtggcaaataaatggagataaccgcatgtcactaaagtccccggcagaaacacagattattacatggataattatcggcattttttctgcttggggaggtttagtacgatacctgatggacagacaaggcactcgcagtaaatggagttggatgggtgtgctcagccaaataacgatatcaagcttcaccggtttattaggtggattattaagttttgagagcggcgccagccattacatgacattcctattttctggattattcggcacaatgggcagcacagcgttgagctacttatggcaccgtttatctaattcgtcagggaagtaacatggcttattttatacaaaaccatgccaacagacagaactaaccaatagttagtccccaatgggtccaagttgttcactcagtattttaactttcacaaagagctactcatgacatttttactcccaactatctacagcaccggaatattattgttcgccttgcttcttatcgtacttttggttcgtcatcagcagcgaacgtctaaccaagctcaacgggataatcaacggctaaaagcgcagaatgacttattgaatgcccggttattacagctgaaaagacaggctgaagatttagcctcggctataaccaaacaagcgcagcatacaaaacagctggagaagaaaaatgcattgttacgggaacaaccgcatgtcatccaggccgaaaaggcctaagctgctcgaattaccccaacacagctatccgacaaaatgcactcccacagagtccaaataactctccgataaaacttatcccacataatctttgagagttagtccacccgtatgagattgaacgcagcaagattatccagactaaaataggcctaatatttaccccccctatactccccattaatgaataagaaaacctttcagaaatacgcctctctcactaactttattcaacgtcactgaccgcttctctcccgtcctcaagttttccctaccacagcctgaaaagaggcgcaaaagaatgcaataaatttagcgcatcagatcaagccattattatttaatcaattaaatacgttataacttataatttaataaaaaaacaaaataagttttgcattaaaatataaatatcgctgtcatcactcaaaaaatcaaacacgaatagcttagttaagataaaaatagagcattaacgatatcatcaattataacccgatattgatttcttaatcagtgatttattgaatagtcttttcgtaccaacaaattggttggtataaaaaaggataaagatatgaacaaggtaaccatcacgattaatacagaatcaaatacagttgaagtggaaaaaccaactgaaatttataaagctcaagcagcggctttaatctccgcccccctcagagcaagagtcgcagccgaagtagcgccaaactccagcaccgaggtcttctatcaaagcactcccattattccagaaagccgccgaaacataatgatcactaatgatggcgcggcaaacctcattactgccgagtattattggtcgcacagtttcactagccaatggttcctttatacgtccattgaggtgagtgtcggtgaatctaagttactgcagtcaccatcgaactctctatattacagcaaagtggtattggtaaataaaaccagccgaaaagcgtacgtaacagcagaggagaaataaaagtagcgattaattaacggattgtaaatcttctatcagaggaaaatagaaacagcctgaaaaatcttatcttcatgccagtgaagagccaggactttacataaaattctgaatttcggctcaagccggattgagactttttatggccaaaaaaaagttttaaatattcaatctgatttgaataaatcatgaaaataaaaggtaagttaaatgaataaaattacagagtatgacaatatcgccagtctgactccttaccctgtctatgctagctcggcttacgagtttgactggaattcttccgctatccttaagcaagcgataattaaaggtatatcctttattccttacgttggagattatctgtcctcaattatcgatttcttctggaaagatcaagaacgcgatatttggcaggaaatgatgggacagctgcaccagcttattgaggaaagtgtccttaaagcgattcagggtatcttattaggcgatatcgccgaacttaaaggcaagattgcatccgtagtttccgcgctacaggatcatcccggtacgccagaagccaaaagcttatatatgagtgtctccgtaaatttagacagcgtacagcgcaagttcactacctttgatcacaaaaccaattaccatattctttccatgtattcgacgactgctctgatgcaaatcatgtactggactatgggtattgagcgtaaagatgaaattggattaaacaacaatgaggttgggcaacttcagcggaacattgatcaactggtaaagcatgtcgaagattatacacagggtatttacgatacagagctagatattcagtacaacgaatcttcacccaatacagtggcaaataatgtcatgtacgcccacggttattgccgggtacatggtatggaatatacagagatcattcaaaacgttcaaaaaaatggcagtaacacgaaaggtctgtatttaaaaacgttgtgttatttcaccttctttggctggccaaccagccaggctcggattttagcgttaaaagatgaaattaatatgcctgagccattcaaacccagtctggttaatggtcgcatcaaccagattaaatcgattaaaggctatatccagcgtattggcggagctttgcgagtaggcgggttcgaaattatctttgcaaacggcaacagataccaacagggtacggttaccggtgaatcccgctcaatagaacttaatggaagcctgattaatacgctcgaaacctggggaaatggagctatcgatgaggttaaatttaccttaagcgatggccgaaccttgagtgtcggtcagcgctattcaactaactatcggaaattcgctctcgagggtcactatatttctggcatttttgtttccagcgatcgaaaagagctggccggtcaggccgcgaatatttgtgtttcttaccaccaaaaacaatagctttattaatatagagattattttcaattctatttaaaactaaaaacaaacaggaaataaaaaatgaataagatgcctatggctttattgttatctattttttgcatttcatcttatgcagctaatgatgtgagttcaatttcagagactagtgttccacctgaaaagaacatgcaaaaatcactcaataagagtgaaacctatacctatataaagtgtgcttaccggaaaaacaaagataaatcgtttgacgctacgtcatcctgggaatggggccgcgcaggcaattcagccaatgattatgccaccgttaatggccattggtattccagcgctattttagccaatatgttttatacgaaatcaactcatcaggaaatcaaagacgtttgtattaatacattaaataagaaaaatattagttttaccgaccttatcccttatgcgtcagattacacgttgtcttactactattcgttctggaatgaaggagacaaaataccgacaattgatattggtaaaactaaactggaccgaatggttgtctttggtgacagtctatcagatacgatcaatgtctataatggttcctacggaactgtgcctaacagtaatacctggtatttagggcacttctcaaatggattggtttggcatgagtatctgagccaaaaacacattaaagtgcctagctacacttgggcaacaggtaacgcggagagcggtagcggccttatcttctccggctttgggcagcagctggactcttttgagtcctatataaaaaaatctgatgggtattctatcggtaaaactctttttctggctttatttggtggcaatgatttcattacgggcagcaagtcacctgatgacatcattaataactataaaaatgatttagtccgactaaagaatctaggcgcgaagcagattgcggtatttagtctacccaacttttctactgttcctgctgttaaaggttggagtcaatctgataaagacaagttaaaaaataaatctatcgagtttaacactaagctaatctcattaatcaattcactgaaatcgacatatcctgatgttaaatggattatgccaaatctaaatacggcgtttgaggatatcatcaaaaaccctgagaaatttggctatgttaactccaaagacacctgtttgaatttgcgagattcaagtctcgattatattaccggtgcgtcaccacgagacgaatgtaagaatagtaatggcgcttttgttttctgggataatatgcatccaaccacgaaaacacacgaaaatatcagtgacattttggcgaatgaaatcaaattggcactgtaataccttacgttgtatccgataatcgtcatgcaaagtgcgcgtatatctacggctgtggatatacgctttttacggccattagttctcaccgccgttctttatcaacgttacggtttctcactgctatttttttctctactatttttctctgctactttttaaccgtcatttgtttttattagtcttgttaacaattcgttctctcagagcaaagacgcagcctaatccgccttgtattttactcaatcagcaatctattagatgaaaagcggggcgtcatttcacaatgcacatcggtcggccagaaatcggttcgcgatgaatttgcgcgtcaatctgaaaagtttccgccaagagctccggcgtcatcacctcctccggcgtaccctgaacaataactttgccctgcctcatcatcaccaaattgtcgcaataacggctagcctgattcaggtcgtgcaatactgcgaccagagtttttccctgttgattttgccgacggagcaacgccattagttcaacctgatgattaatatcgagataagttgttggttcatcgagcaataacagcggcgtctgctgcgccaataccatcgccagaaatgctcgctgacgctgccctccggaaagctcgctgaccaatttatctgccagatccgcgatctgagtatcgcgcatcgcctgctcaactttgcgtttgtcatcggcgcttaaccgcccccacagatttaaccacgggctgcggccatagccgaccagttcgcatacccgaataccttctggtgaaacgtgctgttgcggtaacaatgcgagttgacgagccagttcgcggctagataatgcggaaataggatagttatcaagccatatgctgccagatgatggcgtcagcaaacgcgaaaaacacttcaacaaagttgatttcccacatccattcgggccaagcaatgcggtaattttgcccgctggcagagtcagcgataagtcgctaagaatggtatttttaccgtagccagcgcgcaggttctcaattgagagttgcatcagcggtttctcatcaaaagccagaaaaaataaggagcgccaatcaccgcggttaatacgccggctggcagttcaaggggaggatgtagcgttctggccagtagatcggcccataggaggataagcgcccccaccaacattgccgcgggaatcagcagcaaatgacgcccaccgactagttttcgggtcaaatgaggggcgaccaacccgataaatccaatcgggccgcatacagccacgctgatagccgccagcgctactgccaatattaataccagcgattgtacgcgccgtaccgaaatgcccagcgttgacgcactattctctcccagcgccatcacgtccagatcgcgacaaaaccacaggctaagcggcaacaggatgaccagccagggagcaataaccagaacaaatgaccagcctctcccccacaaactgccggtcagccataacagcgcgttattgatttccagcggatgtgacagcatcagataatcggtcagactggcgtaaaaagcggtcagagccacgccagttagcgccagttttaacgcggcggattgacccgcgcagacgcgaagtagcataaacgccaatacgccgcccatgaaagcaatcggcggcaaccacagtaccgatagagcgggaaatagcatcaaggcgctaaccgacgccagccctgcggcatgattcacccctaaaatatccggtgacgccaatggattgcgaatcaccccctgaactaatacaccggacaatgccagcgccgcgccaaccatcattgccagcagcgcacgaggcaaacggtattcgacgagcggaaaatagttgtcgtctgccggaagaaaagccatgcgcatctggctgaaactcaaagtgtgggtgccataacgcagtgacagcaacaatgtcagcaataccaacgccggcagcagtatcaacgtgatgaatgggcgcttcatgttcggctcctgaccaaccagataaagaccggcgcaccaatcaaagccaacactgcaccggcggggatttcgcccggccacgccagcactcgcgccagtaaatccgccagtaacatcagcgtagcccccatgatcatgctgacaggcagcatacggcgtaggtcataaccgatccaacctcgcgccatatggggtatcaacaagccaataaaggccagcggcccagctacgctcacgcaggcgcccaccagcagcaataccatcagattaattaataatcgcaaacgaggaaggttcactccaagtgagtgagcgctttcatcgctgacctgcaatacattcaagcggctagcaagcagcaacgccagtggagccacgatcagcgtgaaggggaataaatgccaaaactccggccagcgcgcatgagcaacgccaccggctagccagttgagtatgctgtaggcctgatcttcagacaaaatcagcgttgctttggccagagcagcacatagtgccgataccgcaacgcccgccagaaccagccggctacggtcacctgcctgctgccagccgccgccaagtagcataacaacgccccagctgatacctccacctaaggcggcagccaaagcaatgctaaagccagaaaacagctgcgggctaagagcgctaaccactaccatcgccagcgaggctccggcattaatccccaataatgagggggaagccagcgggttgcgggtcagcgtttgcagcagactacccgccagagccagactggcacccaacagcatggcgaccagactgcgcggcaagcggagattcagcaccaaagcctgcgccaaggttgccggcgcacccggaaacaaagcgcgcagcgcctctaacggcgcaatcggcacggccgagcggcaaaacaacgtgagccagaaaccaagcgctaataccaacagtggcaatgcccagcgccacccgataaaaaggcgttttattagcataataacattgcgatcatggcgtttcgtttcttgaccgatgatgcaaaatggccacggcgtcactggcgatatgctctgcggcaaaaaccccgcgcatacgcgcccaggtattgctatctaccgcagcaacatgattttgctgtgccgctttcatcacctgccacagcggatctttctgccactgtcttacaatactttcctgacgataatgcgcgacgatcagccattctggatcgatcgctaatagctgttcgagactaatattggcgagcgcctgcttattcacgggttcaggcacgatcaggcccaaagcggtcaaaacgctgccagtgtaagattcacggctgtgcagattgaactgctgttcgcgggaagtaccgaataccactttttcaccttccggcaactggccggcaaaagcctgcatacgttgatgatgttcggccaagcgcggctgcattaaggcatttttccccaacacttcaccgattatcgccgctgattccagattttcactgtaggtttcattgcgagacttaagcatcagcgtcggcgcaatgccttttaacgcagcataaataccaccgtggcggctgctgtccgcgatgattaaatccggttttaaagccgcaatagcttccagactcggctgtgaacgtgttccaaccgactgccacggctgaatgcgctggcgtacctccggcaatattctttcgggatcgttatcgtccgctacgcctaccgggctaacttcaactaaggctaaagcgtccacaaatgacaattccaaaaccacaacccgggaagccatgccattgaaagtaaaagcgccctgctgatcctgcaccgtcacagctccggcgttgcctagacataaacacatcagacacacgggaatggccaatcgtgagataaaagacatagaacctctggcagaaaaagtaaaaattaccgggcatcctatagagacacccggcatagcagcgatgctgaaatattagaatttcaccgaaccttgcagataaagggtacgcggctggccgacatacattcctttgttgttatcgtcataggcgcgggtgaagtaatggtgatcgaagatattcttcacgcccaccgccagattcaggttggccatttgcgggccaaagttgtaattggcgcgagcgccccacagcatgaatccaggaattcgcccgttactgccgtccacgctttctttcacagtattggcattgtccgcaaactggctggactggaactcgctatttaggttaaacgtccaactacccggtgaataatccagccccagcgtgcctttgtttttaggtgagaacggcacctgattaccgcggttagcaccttcttcacggattatcgcattcacataggcatagctggcgtaggccgaaaggttatccaatgcgggagataaatccgccagatcgtagcgcacctgactttccaaaccgctgtggcgggttttaccgcgagcggtcacgctatcagtcacctgattggaatcatactgattatcaaagttaatcaggaacagtccgacttccgctttcacgatgtcgttatcgaagcgcgtccccaattcccatgtgcgcgctttttccggctcaattttgccgctatccacggcttttccgatttggctgtactgcaccgtaccgaaggaaccttcggtattagcatagatattccaggcatcattcaggtgataaaccacattcagagcgggcagaggcgcgttgtagctgatgtcctgcttagtattcttaatgtagttattctgataagactgaatacgctcatagcgtatccccggcgtaatcgtccaatcaccaatatcaatacggtcatcgatataccaggcgtgagcctgagttccggactgagtatcccggtcaaacgggctgctggtagtcggtaattttccactgctggctaaactggtgtagcgcaattcatgggttgattcgctaacgaaacgatagccgatacccacttcatgggcggacgagcccaatgtgaagctttggctataacgcggttcaataccacgaacccaatattcgcgcggtgacagggtgatatttttgccctgattgagatagccactgcgtaaggtgtaggtatagaagctctggatattaaacttatgctgttgatccggttgatattggtaacccagactcgcgagctggcgacggccccagaattcgtcgtaaggacgcgttgactggaaagggtcggcgttataagccgcacgtgacaaaccgcccggcatttcagcccgaccttcataatattgcagtaagctattgaaagtatgtacatcgtttggcgcatagcgcgttttcaacatcacatcgtcgattttggtggaactgtgttctcgccagtcgctaccgcgagtgccagaatacagcagcgccgctcccagaccgttatccgccgtgccgccaatcatcagatttccggtgcctttgggatcattctggctcgatgtcgggctcagtgcgccttccatgcccgctgagaggccaaaatcctgcggaatagcgcgagtcacgaagttaaccacgccgccaacgctttgcggcccgtaacgcacggcaccgccgccgcgcaccacatcgaccgcatccagattacccagcgaaaccggtgcaagggaaagctgaggctggccgtaaggggcaaaaggaacgggaataccgtccatcagcacggtagaacgactggctaaacgcggattaaggccacgaataccgaagttcatcgccatatcatggctgccagtgccattgttttccggcgcattcacccccggcatacggtttaaaacctcacgaacggtagtcgcacccgttttagcaaactctgcgcggcgcacgacatcacgcgccccggcgtgttcaaaaatgtcattttcacgcgcatcccctaaccaatcaccgactacggtcagagtatctgcgttagctgagacctcaggctccagcgtgaaagcattgccgcccagcgctttactccgtaaaccactacccgataacaaagcgtgtaaaccgctattcaccgaataattgccgtttaggccttcgctacgtttgccgcgagtcagtgaggaatccactgacaaagtgatctcagactgactggcaaacagattcaatgcggtatcgagatcacccggtgcaatgtgatagctcgcggtggcagaagccgccgtcgccattaccggtgccagcatcgccgctggaattaacgtgcaatgaatggcgattgccaatggtgttgccttgctaaaaatgccaaaaacgcctgcgcgtgaagaaatggacataccctctccagaatttatgtttttttactgtgctatgtaggagtcgaatgaaatcgcaaaaggtataatcgcgaatgcgactttttatcatttttatttagaaataagcattcaggcaggcaccactttcacccaatatcgggtaagtgattgaactttaacaggaagagtttgagtcagtatttttagcaaacgatcggtatccttgagaggaaaagtgccgctaatacgcagctcggcaaccgtcggatcgcagcttaggcggccatgtcgataacgcgcaatgtcttcaatgacatcacccagccgcccgtcactgacgcttaatcgcccctgagtccaacttccggcaccggcgattaacggagtcaaggcagagaaatcccgatcgctgaaactcaccgactgaccttcattcacggtgataatttgatttggagcggcgcgtagcttcacttcgacggcgtgtttaagcaccgataactgtgtgatatctccggtttgtcgcacgataaattgtgtacccaacgcccgcatccagccctgcgatgtttccacaataaaaggtcgagcctgcagatcttttgcagtggtaatgccgatctctccctgatgtagccagatcagccgccgatccgtcgtataacgaatgtctgccgcactggcggtattgaggaaaagttgggaaccatcgctcaaaggcagagatttaatttcaccggtcgaggtgcgcgcatctgcccacagcccttgcccggtaggcgactgccaggctttccaggaaccaccgactcccagaaaaaccaccaatcctttcaatacccgacgccgagtgatttccgcctgctgtcgtgcctgattgagggtttgatagctgaatgtaccgggcatgctgtgaaactgcccctgtaatgcctcgacccgctgccacgcccagcgatgatcctcatgctgctgataccaaagttgccacttttgcttttgctgcgacgtgacgttttcgtcacaaagggcagcaaaccactgcgcagccattttcaaggcccgttgctgagattcagataatgaggaactcatggcgtttgaggatgttccagtgcaaacagcaggcaatgttcggtcgcttttgccatatattttttgactgaaataaccgatatctgtaaacgttcggctatcaccggataagtgagcccttccaactgcgacatcagaaatgcctggcgcaccttatgcccaagcccatcaagcatggtgtcgatttgttgcagcgtttccaacaggcactggcgctgttcaggtgaggtgacagaaacttccggcatttgcgccagcatttcaagataggcacgttccagcgcgttacggcggaaatagtcgatcatgacccggcgagcaacggtgcataagaaggatttgggttcacgaatttcatgagctttattgccgacgagaatccccataaaggtatcctgcgccagatcgtctgcatcatatgtcgatcccagcttcgatcgcagccaatttcttaaccagtgatggtgcgagctgtagagagcttcaaagctagcagaaggtgacgcaccagcgagagtggacatagacggttacaaaaccctaccgagaatttattcaaggataataattgataatagttatcattacaatcgagaatcaaatgctattttatttcctcctttttaatcaatttgttagcgttatactcgcaggttctggctagagataaatttaaacgctttattggcgtgagtttacatgaatatgatcagcgtcaatcagagaattccgcgtcggtatcggggcgttctttaaaagagatccgatataactcatgccattacattaaatataaggataaggataaagataaagataaagataaagataaagataaagataaagataaagataaagatacagatacagatacagatacagatacagatacagatacagatacagatacagatacagatacagatacagatacagatacagatacagatacagaattaaagttttcgtcagtctatttaagaaaaccagccttgcggctggctattttatctctggaatgtatttatcccgcgactttagcgactctagcttgatgtttaagaatatcccgtgctgaatcagccataatcataatcgcacctgccagcatcaaagtatcctttaatatcaatcgtcctgcccctgataaataagggaaaccgtggtgcatgtctcccaaattcggaacccaggcttctggcgttgtgattaaaaatgaaagggtaacaaaaggcgtcaggaacgctagcaggccgccaatcaggcctagccaacggctaaacggattggctaagaccaaaagagcaatcagcacttccacaacacccagtccattagaaaaatcgtaggtgttattcatttcttgccactgtctggcgacaaggtttaactcaccttcgtgcgtcatatactgtttatattcggtgggattctcatagaagaatgacatcaacgggctattggcgacaaaaggggtaatactatcggcttcgtaaggtacaaatttcaacaaaccgatccagataaaaacaatcgcaatgcttaatcggatcagggtaagaccgaccttatcaccccgactcagtaactctaaatacttgttcatcgataaactcctttttatttatctgacacagcagtagaaaaccgggttaattagataaacacccgtctttccattgatgagataataggtttatctgagtgagttgcatttttcacagactctgaatttttttgtcgtatcgtctgaaatagcgtgactacccataatcgataaaacaactctccgtccgaaatagagcgttgtaataaagcagaatacttttattgaaccagactgaataaatcgtttaaagattcactcatcgaaggatgagtaaaaatctgatcgcgtagtatggtataaggcagccccgcatccattaccatttttacggtattgatcatttcgtgagaatcagggcaaagcaacgatacaccgagaatctgctgtgtcttattatcaataatcgcttttagcacgcctctcgtatcatttaacactcgagctttcggaatagcagcgaccggcagggtaacaacctgaatatcggcaccgctattgcgcgcttgcgtttcggttagcccaacccgagacagcggcggattcatgaataccgaataaggtacatgtttacgatcgccggtatggcgtttaccactccccaatagctgatcccgaacaatgcggaaatcatccagcgaaatataggtaaactgcggcccaccttttacatcccccatcgcccagatatgactcgccgtggtacgtaaataaggatcgaccatcacagcaccgcgatcgttaacctcaactcccgcctgatgcaattgtaaatcttgagtattcggcgctcgcccggacgcaaccagtaaggcatttacgttatagtcaccttgatcggtatgcagctgaactgcgccattatattcagatacgcaatcgaccttggcattgagcaccagttcaacgccctgatctttcaaaatacccagaatcgcccctgctacatcctgatcttcatgaggtaaaaagcgcgatgccgtttcgaaaatagtcactttactaccaaactgagcaaagattgaggcaaactccacgccaatatacccgccgccaagaatgcccaaatgaacgggcaaagtttccagattcagcaggccggtactgtcataaacccccggcgttgatgctaaaccttccaccggtggcattaccgacttcgctccggtattgataaagatcttttcaccggtgagcgttaattccccttccggcgttgtgactcgtagcgtatggctatcaataaattccgcacgcccatcaataacatcaacattctccaaatccgccagattgtgataattcttatcccgcaggaaattaaccagatcggatttacgacgcatagcctgagaaaagtcataatggagttgcgcatcatgaaccaaagctttagttgggatacagccaatattaatgcaggtaccgccatacattttctttgactgctcaataatggcaacttgccagccggctttagccagggttacagccagagttttcccgcctttcccaaacccgactatgacagcttgataatgattcatgattcatcctcgccaagaatttctaatccaaacctgagaaaaataacgcccctaaaaatcccagaacgatttcgataggtcatagtgtagctataacgactgtgctaacgtatttccatcacgcttgataaattgttctggagtctaatttggatacccttagcaggctgatcgctcttaatcccccgcggggccgccttgaccgtaattgtattctggatggtgactggcaattacctcacgccgcaggtgacttatccgtcattcgctggcatgtggtcattaccggttcggcttggcttgatttatcttccggcgagtcccgcctgctggaaaataccaccatgctgctgttaccccaaagctccgcccatcgcctgcgacagcatacaaaagaaaatacccagattttatgcggtagtatgaatatgcccattagcgctcgccattttctgaccgcgctgccagaggtattggtgctgtcccctgagaatgcctcagtaagtcgggagtggttccactacgctatcaaactgatgcaggaagaggtgaatcgcggccagcccggtgccgaagcgatttgcagccaaatgtgcgggatgtttttaacctttgcgatacgtggttggctacaacattctccactggataaagggctactgcaggctttgctacatacccgattaggtgaagcggtggctcaaatgctggaagctcctcattatcactggacggtggaaagcctggcgcaaatcgcccatatgtctcgggctagttttgccgaagtgtttcgtcaggtctcagggacaactccgctttcattgttgacgactctgagaatgcagcttgccgcacagcgtctggctcgcgaagccgcgcctttggtagctatcgcagaactggtgggctatgccaacgaatcatctttccacaaagcttttgtgcgccattttggctgtacgccggggcaataccgtaacaaagctaaagaattggcgacacatagcggagactagagggttggccataaactgcctgttttaaacagaaacgcaactcatcgtttattcgctgtgcgtttattgacgacgaactgagtaaccattcgtttattcaccgccagtgtggtggcaacgctccgatcgccagcacattatcattcccttttatcctattgcacccggcttaatgggtaaccctcaattttaatcccaatgttatttttttgaataagattcatataaactgaatgcctttctctatcagtcgaactgaaatgtgattatcaagctgcaaagacttacaaaaacgcgtcgaattatcgaagcgaatgtacattctctttttgataaatgccatgtgttctatcttctatcttctatcttctatcttctatcttctatcttctatcttctatcttctatcttctatcttctatcttattatcgtcgacattatatatcttagctaattccttattggtgcagcgttgtagcataagaaaaaaataatatccctgcacgtttaacaagtcattttatacctcgctaaggcaccatcagggaaacctcatttacgttagaaagcgcctttggaagagcaagattaattgccataggggagctaataatacaagtagatataccgacagccagaacttactactcttaaccggtttttactttccagttgattatttatcgcccgatttaatcagaacgactaaatataaccgcgcacctgctgataataaaatgcctaaatcaggaaataaaaaagtcagccactatataggctgactttttaacagacttttatgattaatttatatcgggatgctgggcgataagattctttctttttttctccagctcagcaatttcctgatcgatatcctcaatactttgctcaatattatcatggtgttcttgcaggatttccttagcttctgcccggtcggaagctgccggcgtagcgcctttcagcggtttattcgccgtttccttcataaatatccctgtaaccaaacctataaccgcaaccaccatcaaataataggctggcatgaagagattctgagtggattcaaccagccatgcggcaatggttggagtcaacccggcaatcattaccgatatattaaaagcgatggccaatgcactgtaacgaatatgcgtagggaacatggcaggtaaagttgaagccattacgccgataaagcagttcaacaatacggccagaatcaacaatccacagaatatcaggccaatcacgccgctgttaatcaggatgaagcatggaatggccaaaacaaaaaggccaatacttccgcatacgataaaaggtttgcggccaaatctgtcgctcatcaatcccataattggctggacaaacaacatacccaacatgatggcgatgatgattagtacaccgtgatcttccgaataatgcaggctatgagacaagtagctcggcatataggtcaacagcatgtagtaagtgacgttagtagcaataaccataccaacgcatatgatcagatttttccattgcttcgttagaatttcgcggaaagaaacctttggcggttgagtaatattattgcgcgcatcgctatccatttgctcaacatgctgttggaaggttggcgtttcttccaaagcgtggcgcagataaataccaatcaatcctagcggagctgcaataaagaaaggaatacgccatccccattcaaggaaattagcttcaccgacaatgctggaaatcagaacaaccactccggcgcctaaaataaaaccggcaatggaaccaaaatctaaccaactcgcgaggaaaccgcgctttctatccggagaatattcagcaacaaaaatagccgcgccggtatattcacccccgacggaaaagccttgggccaatttagccaataacagtagtatcggtgcccaaatcccgattgatgcataggacggaattaagccaatacagaaggtactgacagacataataataatggtgacggacaaaactttttgccgtccaaacttatcgccgagggcaccaaagaatatgccgccaagtgggcgaaccaaaaaaggtacggaaaaggtcgccaatgcggcgatcatttgaattccgggatcggctccagggaaaaatacttgccccagtgcgaaggcgacaaaaccgtaaacaccaaaatcaaaccattccatagcattgcctaatgcagccgcggtaattgcttttttcagtttggtgtcatcaatgatagtgatatcattgatttgcataggttttacctttcttttgcgtaatcccattatttactcccttgtattcatcttcattccactgtgtaaagccagaaagagttaattgctttagcagccatcaaaaaaatttatgtaactatataagtaataacctatgtaattacgtgatgcaatgaagaatcaggtggaaatacgggctgaatggctatttttactgacaaaaactgacgaaatttttatgaaaaaaaaccttatttttctcaatgttactgatattttttcctttagaacttacagggttagcgaaaattgacaaaaaatgacgaagacttaaagctcacgaagaaaaggacgaaatcatcgacgcgttcaaaaaaaataataaatttcctttgacagagcaaatgactgttcttgcggaataaataacctaacgaattattttgatacattctcgttagccgaagcaaccatagataaatagtggctaataattatctgattagccataaataaggcaatgacgctttagtagaatggcgaggccctttatttattgtttcccttccttttttagcagcgctctcttgcgctcaacaccccaacggtagccagacaacgcgccatcctgacgaacgacccgatggcaaggaatcgccacagccagcatattggcggcacaggctccggcaacggcgcgcaccgcctttggtaaaccaattttatcggcaatttcgctataacttgccgtggcacctaacgggatttctcgcagagcttgccagacccgctgctgaaaagctgttccgcgaatatccaatggtaaatccaggccaatttctggcgtttcaatacaccccaccacctgagccaccaggatgtcaaaagcttcatccccgccgattaaaaccgcctgaggaaacttatcttgcagctcttgcactagctgttgcgcactctctcccatccaaatcgcgcaaattccccgttcacttttcgccactagaatatcgcccaatgaacactggccaacggcaaaataaatagttgttccggttccaccgcgatggaatgccttaggcgtcatgcctaacatggcattagatttatggtagaaacgtgcattcgattgatagcccgcttcgaaaatagcgtcggtaacaaaacccgtttgcgccaattgctgacgtatccgctgagtacgcaaagcttcagcgtagccttttggcgtcaggccaatcgccgctttaaatcgtcggtgaaaatgatatgcgctctggcccacataatcagcaagttcatttagcgttggaatatgatcggacttttcaatatagcggcaggctttggaaattatttcgtactgctgatctccctgaacaccgccgcaacgtttacacgggcgaaatcctgctacttcagccgctaacctattcgcgaaaaacaccacgttttcctgccggggctgacgggatgggcaagacggtaagcaataaataccggtggtttttaccccatatataaaagcgccatcggcgtctttatttcgctggacgatagccagccaacgcgcccgatcgctcttgaaattctgtctagcattcataatcgttaaccctcgacgaatggaatcgttaaggcgttgccgtttaaaatttcggtcccgccagtgctagccagattaattcagagaaaacggtcaaacactccgcttcttgctttttcattcgagcttcgggtgaaaagactttaatattccccccccccccccgcgagcggaattatttttcactcatctttggataaagcccaaagatacaaagaagcggtggtgccatagggtgaataacgtgttctataacgtttaaagcgctctttagtcagttctttatgacgatataaattcatcataccgcgccgaatagccaaatccccccaactcacaacatctggacgcgccagcgaagaaattagcagcatttctgcggtccatacgccaataccatttaatctggaaagagtgcgaatgatttcgtcatcgctttggctatgaatatttgtcaaatccagctctccgacccgcaccgactctgctgcccctttaatatattgggcttttttcattgtcataccacagcgctgtatttcttcatcaggcaataacagaatgcgttcaggcgtaatatttccgactaatatctgcaagcgcgtattaacggtttgcgccgcttttaccgatatttgttgttcaacaatatattgcactaacccggcaaacagatcgggattggttggacgttgtaacatgccaaagcgttcaatggccgcagccatctttttatcgcgttttttgagatgctgaatctcagtttcgccataaacaaaaaacatgcccgcccctcagtgaattgccttcgctacgaatatccttcattgatactgtatttttatcatgatgaatagagccaatctggaaaatattgacgctaaacgagataggattttatttatcggcccaatgaggttcacgccagagtagttttcgctgccagtctcggcaaacgcttttcatccagcttaccatttggcgtgagcggcatttcactgagcaaatgtagctgactgggaatcagatattccggcagcctgtgcgccaaatcacagagaatacgacaaggctccggcgcgcaggccggataacactgacatagggtcgcaaatgccaacagtttttcctcagcacccaatcgttgaacgaccactttgacctgctttaataacgggcacacgcggatcaactgcgattccacttcggcaatatcgatcagataaccgccgattcgtacctcttcctctatacgccctagaaattgataatgcccgcaaggcagttttctgaacttatcgccggtacggtataagcgtaacctttggcccggtattggctgccactcgataaatcgctgggcagtaagctgcggttggttgagataccctcgcgccagcccgaggccagagagataaagctctccggcttcccccggcaggcattcggcaccgtcacggtccaaaatccaagcctgaatcccagtaaccggttgaccaacatgaacgcgctggccgaggaaaatccgcccataaagagcggttaccgtacattccgccgggccgtacagattataaagcgctacgcgatctgcccagcgatccgccagattttgtgggcaatcttcacccccgatggcaatcagcgacggtaaccctgcagcctgaatatcaagacgagctaacaatgcggtaggtagaaataagtggctgctgcggctgtggacaatagccgcggtttccccgcagccaagagccaattctcctccgcagattaacggcaacaaagcggccatattacccgcgtcaaatgccagagataaggcgttatacacccggctgttggcggtgattcctagccctttagcatgatctttcaataaattagccaaagcgccatgttcgatcattacccctttcggcacgcctgtggaaccggaggtatagataattaaagccaactgctggggacgacgaacgacctgcggcggttggctgcccgaccaacgttgaataccgcgaagaaatccggaagaggttatatcgaaatagcgggcgcaggaccaaagcgccattgaatcaccgctgccaacgccaagaatcacgctcagcccagcgtcggcgaccatatggctaagtcgtccaagcgggtaatccatatccagcggcacgtagcaggctcctgctttccacaccgccagcagtgccaccagaaaatagggatcgctaccggtaagtacgccgatccttgagtgctcacctattccctgttgattcagccagttggcaatacgattagcatctctttccagctgaaaatagctgatgatcccctgttgcgcattccttgccgcaatgcgatctggcgttaaccgactccagacctcgatcaggtcagtgaccgtttcttccatcggataatccatcaggccgccagagttgcgccaccatccacgacaatatcctgcaacgtaatatggctagctaaatctgaagccaagaacgcgaccgtttgagcaatttccgcaggcgtagcgattttccccagcgggattccgagcttgtactgctgaggaaaaccggcgatggtgcgttgctcggcgtctggcgtttgccacattccgcgttgcattggggtatcggtcgatcccggcgaaaccagattgcagcgcacgccatagggagctaactccagcccaacgcaatggctgaaactggttaatgcggctttagaggcacagtaagcggccatttgcatacgcggtacatgagccgcatttgagccaatgctgactatcgcgccggaccgctgctgcttgaacaccggaataagctgttttaacagataaaaagcaccagaaacgttgacgtcaaaacactgctgccagtcatccaaactcaagctttgggcttctcccatacgcaaaatacccgctgcgttcaccaacacatcgatgccggacgcaacctcaagcagttgctcgcaaacgtccgccacctgcgcaggctgcctaatatccagcactgccgtagtgaaaggatatttttcattgggaaagtttttatccaggccaaagacttccgcgcccagcgccgtgaataatttagccgtttcaaaaccgataccctgacccgcaccggtcacccacacacgcttaccggtgaaatccatttgtaccattgtgccagccattatttcgccccagccgccagttgtttctcaaacagtgcccaccagccatttaagcttggggatttcgccagatcgacaaaactcagctcaataccttgctgacgccattcggtcaccagcgccatgatatgaacggaattcaggccgtaatcgatcagattttcatcttcatcaaagtcttcgtcactttcgtcaatcagcgtcaggagctgtgctttcaagctttctttgctgaatctgttatcactttggtttgcttcacccagcagtgcctcagtgaaaatcacacttccgctacgcgtcgccacatatttcagcgccatcagatgctcttccagcgagaaatcagccaccgcgtccgccaccataaacggcttaatatctttcatgaaagcgtccgttgcagtaatcatgcagccaatgtggccgtagataccgcaaatcaccaactggtcacgccccatttccttcatcatttgttctaacggcgagcgatggaatgcgctatagcgccatttcaccaaaatctcgtcgtcttcttccggcgttaacgcactcactacccgctgcttggccggatgatcgtttaaacctgcgccccacatgtcattcagcagcgcccgatcttccgggctttgattattaggttgagcggtataaatcaccggcacaccctgacttttacagtagcggcgaatggcggcaatattgtcgatcacccgattaatcattgggttattgtcaccgtagaagctgacaaagtagtcctgcatatcgtgaatcagcagcacggctttggtcggatcgaactgccagcccactttatttgccggaacatgttctgcctgcggcagttgataagcagaaagagttggaatcgccatgaaaaaatccttattcactgatgctgatttgggtctgaatggtttgtcgcagtagtcgcttgtctatcttcccgaccggcgtaaccggtaggctatcgaccatttcaaatcgatccggcagcttgaattccgccaccccgataccacgcagatatttgcgtaagtggagcggtttgagactggcatcgcgagttaccacaaaggcacagcttttttcacccagcatttcatcaggcatcgacaccagcgccgcgtgaatgatgctttcgtgggttaacagcagattttctacctcttcggcggcaattttttcgcccccgcgattgatttgatccttctcacgcccaacaacgcacaggtagccgtcttcggtcatctgtactacatcgccagagtggtaaaatccttcatcatcaaaagctttcgcattatgttctgggctacggtaatagccgcggaaagtataaggcccgcgcgtgactaactctcccgcttctcccggcgcaaccggctgaccggcactgtccagcaccctaacttcatcatcggcgctgatagggcaaccctgcgtggtgaaaatacgctcgtcgctatcgtccaaacgggtgtaattcaccaagccttcggccattcccagcacttgttgcaactgacagcccagcatctgcggaatgcgccgtgccagcgattcactcagtttggagccgccgacctgcaacagtttcaagctagcgagatcctctgtgccaaaatgctcggcggcctgcagccacagagatacagctggcggaactaatgaggtcatggtgatttgatgacgtttaatcagtggaaagcagctcatagcgctaggctcaggagccaaaactacgcagccaccgccatagaaaatacccaatgcgccgggcgagctgagcggatagttatgagccgcaggcagcgcgcacagatagcgggtattttcatcgttttgacaaatatctacgctgcctctgacgctgtagtaataatcattgtgagttcgcggaatcagtttcggcgtcccggtactgccaccggaaagctggaaaaaggcgacttcgtccgccgcagtcggcgaaaaatcaggcaactcgccgtctaattcctcatacagcatggtctgtaacaatggcgcataatcattctcaccatcaataatcacaaattcaagagaaggcactgactgctgcaactgctgcgtaaaggccgcgtcactaaacaaagcgtggctggcggaggcaatcaacaggcgcggctgaatttgtttagcgtaagcattcagctccaaccgattgtggctaaataaggcatttaccggtaccacgccaattttcaacagcgcgaaatacactaaataaaactcggcgacattgggtaattgcaccaaagccgtatcgccatgtcccagtccctgaccggttaatctggcggccagtcgatccgaagcgcgattcatttcggcatagctgaactggcgttcgccgcaaatcaccgccgttgcctgtggacgcagttggcactgtctggacagcacgtccgtcagcggtaaatcaatccaataacctttttcgcgatattgacgtgcaaactccgcaggccaacgggtaaattcaatactcatggcaaacgtccctgtgattgaattcccaacgcattcaacatggtgcctagcttggcttcggtttcggcccattcaagtgcaggctgcgatgccatcacgattccggccccagcaaacaggcgcgcctgagtgtcatgcagcgttgcgcagcgaatcgctaccgcccactccccgttgccgtcttcatcacaccagccgacgataccgctgaataagcctcgttcgaaaggctctaactgattgattaaccgacgagctgattccgttgggaacccgcagagcgctggcgttggatgtaataggcaagccagttccagcaccgaggtttgggcactttccagctcgccgctaatagctgtagaaagatgccacagtgcagcggtgctaatcagtgaaggctgcgtcgggatatttaacgagcggcaatacggcgtcagtaagcggcgaatttcgtcgataaccaaacgatgctcatactgatcctttccagaattcattaaggcttgagaaaccacatgatcgccttctaccgttgcctgacgttttgccgaaccggctaaggggttggtgtaaactcgatctccgtccttacgtaccagaagttccgggctggctcccaacaaaacgccgccttcactcagaggaatatggaaatgaaacgcgcctggattttggcgtaataagtgattgataacccggttaggattgatcggtgtctcggtttcaatctctaaaattcgcgacaataccaccttatgcattgcgccccgacggaaggtttcaaccgcctgagcaaccgcctgtttaaagtcgtcttcattaggcaggctgcgccactgagcgacagaaaccgggtcttctgatgtatctgatgcagcagaaaccaattcctgacggtcgagaaattgataggattgaggaatgaatagctgggtaggctggctaatatcaaagggaatggctccgacaacgataggacgttgcaggccatcggcgcgcgctttgataaatgccttctggatcgattcttgcagcgtaccggggtattccgcaccgccttgtgctcgttgagtaattcgttccgccaccccctgtgtttttatactccgatgtgctgaagtgaataaaaacgctgaggaagtcgctgaaaaaagtgagttatccaaacgccctgcagtgccactgtgtgccacaaaaacctccaccacgatgtaaatagtaatgttaataataattactatcattcctctttaggcgtgataaattacgacgaagcagtgacattgtcaatgtatgtaaatattccattaattattttttcttatatggacaagtcaggaaaataggagattcaactaagccatgtcccttttttttcgtagcattacgcagaaaacccgccgcgtagcctttccggcctttttatgcctgctggctcttttgggcttgagtggatgtaaaccggcggatgaaacgcccaggatttcccctacgcccccagccagcgaaaccaatggtcaatggccccgcacggttcataccgccagaggcgatgtgcagcttgagaaagcaccgcgacgcattgtttctacaagcattacgattactggtactttgctggcaatcaaagcgccggtgattggtactggcgcaaccgttcctaacaccacggttgctgacgatctcggcttctttacgcaatggtcaaaagaggccaaagcgcgcaatctggtacctatgtaccaaacagagccgaatgcagaagcggtggccggtatgaatccggatttgattatcatttcagctaccggcggcgattcggccttgaagttgtacgagcagctttcagccattgctccaactctggtaatgaattacgacgataaaagctggcaggaactggcgctaacgctgggtcaggcaaccggccacgaagccgatgcagagcaagtaattagcgactttgccaaacgtctggatcaggtaaaaaacagtattacgctaccgccgcaaccggtttcagcctttgtgtatcaggctggagggcagaccgccaacctgtggacggcaaactcggcgcagggaaaattattattggagctgggctttacgctagccactgtccctgaatccgtactgggtaataccagtatgggacatcgtaaagatatcattcagttaggcggagaaaagctagcggaagggctgaccggcaacaccttcctgctattttctggcgacaggcctgcgattgaggcgttggaagcgaataagtttctctcccacctagcgccactccagcagaaccgcgtttatgcgatgggcaacgatactttccgcctggattattacagcgccagcaatatgttgcagcgaattgaggggctgtttaagaaggattaggtttgattttgatcttaagagcgtatttaagctactgaaggttggaattgggttcagtttcgtaagcccagcagttcactgtctcctcacttgccgtggaggcttccgagcagggttggcgcgaaagtggggttctgcgaacgtccctcgggcgcgcttgtcaggcaagccagcgctagattcgcctgcgggcgttatcaggatgccatgccatcctggccctgcggctcaaggcgcgctttcaacagctgacggctgttcactcttggcctcatccctgctcggcccacttcctgattgcgcctgttgagtgcaaaaccagtgttcttacgaatcacaatttgcctttcgtttttgatagggcttttgaccttgagtttgatttttcagagcacatttgagcggctgagacgatgagtgagggaacccacttagtgggcaggcgatacgtgcggaggcgcggattgttaaggctcgcgcttacgagccttaactcgattgaggctgttgaggtgagatattcaccaatcgaataccaaccccttgcccccgccccgcggccgctatcacaaggtaagcaaacaaaaattaattctctttcgtttcctctacactcatcttcacgtcctcttgctcagcactccccatcgaagcctgacgcaaaggctggacgcaaaccgcaataaccgcccctaaacccgcagcagcgaccccataggacaacgcagctaaagccggtgtcatcaaacgcgccagcaaacctaatcccaatgcgcccaaagactcaccggtaacaaactgcacattccacagactattaactcgccccagtaatgcgtccggtgtatgactttgaaccaaagtatattgcagcaatccgctgatcgaacccagatagccatacaacagcagccccggtaatgccagatagaaattattagtcaaacccagcgttgcgatagataaaaatgccgctatagacgcatacatcaacaccaaaccgggacggcgaacctccgcgacccaaccgctagtaaaggctccgatagtcgcccctaacggcactaccgaatacataatcccaatctgcgaggcaccaacgtgataagtattttcagccagcgcagggaacagcacgcgaatcgctccgaccatgcttaccaatgtccccaacaacacgaccgagccaaccactttattgctcaatacgaaggaaataccgctggccaaagcacgcagcgggtgttcatgctgcgtcaccgtcggtttcatctgcggtaaacgcaacagcggcagcagcgtcagcatcgtacccgtagccgcaataccgtagttccaacccactccgccgtaaacaataatcagaccgccaatagccggtgaaagaattgaccccaaacgcacggtcagcatactcaaaccgcccgccgccgccagattttcacgtccaaccagcgatggcgtagccgccattaacgccgtcatgcccaaagcgccgaaaaaaccgtcccaagttgccagcacgtacagcacccacagtgaaggcgtggcggcaaaagcgtttatactcagaccaacaaaacccaaaccgcaggtaaaacgagcgaataaaatcaaacgacgtcgatcgagacgatcggccaatacaccgcccaacagcagaccaataaacatgcccaagccatctaacgtgacggctaaccctacctgcagggtggatccggtcatcgcctggatttgtaccggcaccgcaacggtaagcatccccaagcctaatactgagatcaggcgagcaataaataccgcccgaaaatttgcattgttctttaacaggctgaaatccagaagaatgggtgactttgccatgattatctaatccattaatgtcgacagaaatgctgccggacatggccctattgaccgaaaaaagtgtattgtcacgcggatactcgcagaattttgctgatgtaatccaataatgactcgtgctaacatagcgcaaacaaataataatgataatcaaaacgataacaataatcattttattaaagaagaatcgttatgtcccttgataagacactcaacatacccgttgcggctagccaatcgggccgcttctctaacgaccgtcgtcgtgtattcggtttatttctttgcctcactctactgctgattatcatggcctgtagcctgatgttcggtgccaaagccattcctctagacgtggtatggcgcagcttgctgggggaacacagtgggcaagacagtaccctgattttggaatcccgtttacctcgcacgttgattggcgtattggccggagcggctttggggctttcgggcgcaattattcaggcactgactcgcaacccgctggccgatcctggtattctcggcgtcaatgccggagccagttttgccgttattatcggcattaccgtttttggggctaacgccatcagcggctatatgatttttgcgtttgtcggtgcaatgcttaccacgctattggtttattgggtcggaaccttgggagccggcggtgtgaatccgttgcgcctgactttatctggcgtcgctattggcgcggttctcaccggaatttcctccggcatctctctgactcaccccacggtttacgacagcgtccgattctggcaagcaggctcgctggatattcgcaatatgtcagtggttaccgcagtcacgttgccgatcgtagtcggcaccttaatcagtctattgctggcgcgtccgttgaacgccatgcatatgggagaagatctggcggcagctttaggtgcgcatattggccgtactcaattctggtcagtcgttgccgtaactctgctgtgcggcgcagctaccgcagccgtcggccctatcgcctttgttggcctgatggtgccgcatatcgcccgttggttggtcggccccaatcaatgctggattctgccttttacgctggtgatgacgcctatcttgctgctgttctccgatattgtcggccgttttctggttcctggtgagctgcgagtttccatcgttaccgcctttatcggcgcgccgctgttaataggattagtacgccgtaacgcaaggatgaccgccctgtgaaatcaatcactcaaccttggattattggccacagtgacggccggataaatctgcgcgtgcgtccacgcagtttgttgacctgcgccctgttgctgctggcctgcctgatattgggcgcgctagcgttaactttcggcacgctaaaactctcgaccaatcaggtggttagcgctctgtttggtcaggccaacggttatatcaataccatcgtcattcagtggcggctaccgcgagcggttatggcgctaattttcggagcagcgctaggcatcagcggcgctttgttccaatcgatgatccgcaaccctttgggtagccctgatattattggttttaactccggtgcttatactggcgcactggtggctattattctgttcaatggcagctattttgagattgccagcagcgccttaggcggcggtttgcttgccgctgcggcagtgtatttactggcttaccgtcagggaatacaaggattcaggctaattatcgtcgggattgcggtcggtgcaatgctgacggcatttaatacctggctaaccattaccgcctcgctggaagcggctctcagcgcagcagcctggggagccggttcgctgaacggcatcacctgggccaaagccgcaccttcgagcctattcattttattggctacgatgctggtggcgttgcttagccgccgtattccgctgctagaaatgggtgacgatgccgccggcgccttgggcattcccgttgaaaaaacccggctcgggctaatggcaattggggttattttgatggcagcggtcaccgccgccgccgggccaatttcatttattgccctggccgccccacagattgcccgccgcctgaccggtacgccttcggtcacgctcattccttctgctttgatgggagcgttgctgttggctgccgccgatttgtgcgcccagcatctgttttcacctaatcagctaccggtgggcgtggtgaccatcagcatcggcgggctgtaccttatttggcttctaattcgcgagtcccgccgatcatgagtaatctgtatgctaaccctgtaaacaccgccgaaaaccgcctgcgagccaaagccgtaaccttaggttacgaagggaagatcatcagtgaaaacctgaacgtttctatccccgacggcgaattcaccgtcattgtcggtccaaacgcctgcggcaaatctaccctactgcgggcgctaagccgcttactaaaacctcaggctggcgaggtaattctcgacgggaaaaatatcgcccgctatgacactaaacatgtggctcgccacctcgggctactgccgcaaacctcactggcgccggacggtatcacggtcatggatctggtcgcccgaggtcgttatccgcaccaaaaactgctccagcagtggacacaggcggacaaactcgcggtactcgaagcaatgcaggccaccggcgttagcgagctagccgatcgcacggttgatgcactgtccggcggacagcgtcagcgggtctggatcgctatggttttggcgcagcaaacaccgctgttgctcttggatgagccaaccacctatctggatattgctcatcagattgaattactggagttattcagcgatctgaaccgcgaacgccagcacacgctggtggccgtattgcacgatctgaaccacgcctgccgctacgccacccatattattgccatgcgcgatggtcaggtggtgacagaaggcgcaccgcgcgaggtcattaccgctgagctggtggaaaaagtattcgggatgccttgtctgattattgaagatccggtttcccataccccactggttattcccaaggggcgagtgaagaataaaggataaataggttcatttggcgctgaaatggcaaagttgggggcaaaatggattcctatgggaaatatattttttcccataggctatttatacaaattttgagcgtatgtcgcgcatatcattgatggaatccatttaattcatggtaattatcaattaggaagaacctatgccacagataacatcaagcgccttcagtagccgacttgcattttttaaccaactgaataataaacccgagacagaaagccgctccagcggaatgggaaaactctctcagagttttaccggcgtgcggaatagcgcctcgtctcaattttttccccgcccaaaaactaccgctgatcaaactgacggctctttccgttccaacctaaatgtgcgccaatccgctaacggcgaagccccggcagcccccatgtccaaaagagtctctattctggatgtcatgaagctcaaaatggaagcagaagggcaaccatttgacagttttatcaacaaacttaagtcggtaaaagtgacagatgctccgcctccgattaaacgtcaggaacttgcacctgcggctccgatagcggcacctattgctccagtgaatgttagctttcaaaacggtgtgattcctccgcctccgccgcctccgatgttctccgcgccagtgaaggccaaatatgtcccaacagagataaagccggccagtaaggaggatattgccaatctggcggctgcgcagttggctaaagtggcgaagaaatcagaacctaaacaccagatgccagcagattttatggcagcattgctcgcaaaattgccgaagaagattgaataaccagtggctgagaaacaacagaaaaaagcagtgactcactgataaatcctctggttaaaatagtcgttagctaaagatagaaaatattcaggccagcatattcgctggcctgatgtttatgagttacggcagtctgttacggttagcagtcacgcttattttcccaaactgccgatgtcactcagcaattggtttagcaagggacccagcactttgagcgtttccggcgacatcatggtgatatgggaacaatcaagctcaaaagtacgcagattcttcacatacggagcccagatctctgccggtgtttcaccttcaggctgggtttgcgtcgccacaaacagcgtggtttcgccgtgataaaccgccgtggtagccgcagataacaggccaaccgaatcgtcatagttagcctgaatctgatcgaacattttacgcttttcttccagctcatcgccggtagccgccataaatagctcacgctcacgttccacttcagccaatgcttcggcttcaattggcgcattccagtcctgagtttcaggcgggtaagtatcgagtaaaccgaggaatgccacttcctcgccctgttcctgcaattttaccgccataccctgagcaatggtgccgcccaatgaataacccattaaatgataaggccccgtaggctgaatgcggcgtagcgttgccagatgctgttcgcacatttcatccatgttggcgcattcggcgatagcgccgccgggacgcggcgattgcagccccagaaccggccatttacctgacagataacgcggtaactggctgaactgccaagcaaaacctgaagccggatgcacacagaacaatgacgcaccggagccttgtcgcaatgtcatcacttcgccaaaaccgatttcattctggttttgtgactgtggctggctcagcgccgctgccagaccagcaaccgtagaagcaaccattacctgacccacggctactggctgtttcaattcacggcgcaaatctgccgctaaacgcatggctaacagagaatggccaccggcagcaaagaagtcggtatccgcacccacggaatctaccccaagcaggctggcaaacatttccgcaattcgggtttccaatccttcagccggagctcgcccgccgttatctgactggctagccggtgctggcaaggctttgcgatccagctttccgttggcgctgagtgggaaggcctccagactcacgataaccaccggcaccatatgagcaggtaaacgctcagttaacgcattacgcaggacttcggtatcgacttccatctgtccggcagtcggtacgatatagcccaccagttgacggctgtcggcaccggccagaacgccttcagacccgaccagcgtgcgagctaccaccaccgcttgctgcacctgcggtaattccaacagcgcagattcgatctcacccagttcgatgcgttgaccgcgaattttcaactgatcgtcgctacgtcccagatattccacctcgccgttagccaaccaacgggcaatatcgccagtgcgatacattcgctgaccgcaatcgaaaggatcggcaacgaagcggctggcggtcagatccggacgcgcatagtatccctgcgccaactgcacgccgcacagataaagatcgcccgccacacccacaggaaccggtcgcaatagatgatcgagaatacgcagctcagtgttccataccggtttaccgatcggcacactattgccagtgatccgcgccagatccgcgccgtaagccggttgataagtgacgtccaccgcggcttccgtaggcccgtacagattatgtaacggcgcagagaaactttgttgatacaactctgacagttcgcgggaaagcgcttcaccactgcagaatacccgacgcaggctggtgcaggttcgtccctgcccgctcatggcgctgacaaaagcagccagcatggaaggcacaaaatgagcggttgtcacgtcgtaatcttccacgatcgcccgcagcgcttccggatcgcgatgagcctccggcggagccataaccaatctggctccagtaatcatcggccagaagaactcccacaccgatacgtcgaagctacaaggggttttctgcaataccacgtcatcactgcctaatggatactcattttgcatccacaacagtcggttaacgatggcaccgtgagaaaccactacgccttttggccgaccggtcgatcccgaggtataaatcagataggccggatgatcgggggtgatagaaggcgcgacaaaatcctgcgccgcaggccaaggctgagctaaccgatccagtaataacaaccccccctgaccggcgaagcgctccgccagatcgctgagagttataattaagcgtggccgggcgtcctggatcatgtaagccaaacgatcgtccggataaccggtatccaatggcaagtaagccgcaccggcttccagtatcgccatcagcgatagactgagatccaccgagcgtggtaaggcgaccgccactcgatcgccggcgcgcacgccctgccgctgtagatgagcggccaacgcggtcactttttcacgaacctgttgataatttagctgctgatggatatccaatagcgccagatacagcggcgtttcctgcgcctgctgaaccatcaggtcacacagcgtcaccgccggtagcgctacgccggtattattgatttcggctagcagggctttctcatccggcgtttgcagatccagcgctgacaccggtaattccggctgataaaccagatattccagcaacataaccaaacgttgtgccacccgctgtggatcttgtaccacatcgcgatattccaactgcaactgcagtttttcccccggaagcgccagcagcgccaacggataatgtgtatagccacggttatttagaccggcgcaacgcaggccgtggaatgcctgttgatgtaacttactgttttcaggatagttctctacgactaacagcgtatcaaacagcgtgttagcaccggccaggcgctgaatttcccccaacccgagcccatcatgctccaacagctgaatttgctgctgttgcaacgcgtttagttgcgcgagtaatggcagatttggctgtaatttaactctgaccggaatggtattactgaacaaacctatatgttgctcaataccttccacttccgcatagcggccggataccggcgaaccgaataccacatcgttgcggccactcagtgcgcccagtaaagtcccccaaaccccttgtaacagggtgttcagcgtcaaaccttcccgacgcagcaaagcgaccaatcccgccgtcagctcgcagcctaactccaccgccaactcccgaaccggacctgatgagttagcttcagggtaaagaatcgagggcgttgcgcccagcatcgcctgttgccagatctgacgatcctgctgaagatctcgctgcgtcatttgattgattagcgaaccgtagctaactttcagtggtgccaacggcagattgccgtaagcatgcagtagatcatgcagcatgatcgaagatgaccagccgtcaccgatcaggtgatgagcaaccaggatcaatgcgtgacgatcggcggtatagcgcaccagtaccgcttccaataacggacacgggctggcggcgatcaaatctttcgcgagcaagctacgttccagattatggaactccacggcctgccgatccgccgtcatttctgacagatccagcactcgccacggcacattcatttgagttgtatcgatcgtcggcagaatttgcagcggctcactgtgcaattcagtgtcaaagatcgccgccaactgtggatagcgaaccagcaacagctccaacgcgccgcgcaggcggtcagcatccaacggcccttccagctcaaaacggctcattgcgttgtagttattcgcctcacgacctagctgggcgtggaacagcaaaccttgttgcagcggcaatactggcagcaccgcgctgacagcaccgtatttctccgtgaccgcggccattaccgtgtctggcagtttaccttctgccgtcggtttacccggtgccctctcgcccataggctgcaacgcctgcgccattcgcgccggagtgcgttgagagaaaatatctcgcggacgcaattgataaccttgccggcgcagtgccgtacccaacgccatagcggaaatactatcgccgcccagtgcgaagaaatcatcatccgcgccaacctgttccaaccccagcagatcggccgtagcctgacaaatcagagtttcttctggcgtttgcggtgcacggctaatttgctgcaccgcgcgttccggtgcaggcagcgcctgacgatcgattttaccgtttaccgttagcggcaactcatttaacaccaccaacaccgctggcaccatatagtctggcagggtcgcggcaagctgttccagtaactggctggaaagctgcggattagcattcagatccgcatctggtaccgagcaatagccgattaaacggtgggtagctccaatagcttcggcaatcaccaccgccgtgctgacctgcggcaatgccaccagcgcattttccacttctcctaattcgacgcggaagccacgcactttaatctggtggtcaatacggccaacgaaatcaagctgtccctccggcgtccagcgcattaagtcgccgctgcggtacatcacctctccctcacggaaaggattcgccacaaagcgcgccgccgtcagatccgggcggcgcaggtagccgcgcgccaaaccggcaccggcgatatacaactcacccatcacgccaaccggcactctctctaacttgttgttcagcagatacacttcggtattagcgactggtcggccaataactggctgatcggaaactcgcgtactggttcccaaggtgtcaatggtgtattccgatggcccataatagttatgaacgtttaattccggatgttgcttaagcagattccacaggcgcggcgtggccgcttctccaccgatcataatgaaggccggacgatgacgcccgttttccagcagaccactgtcgatcatttgagagaagaatgacggcgtgatatccattgtatctatgggtatctcatccatcatttgcaccaatgaataagcgtcgcggcgcatttcttcgtcgaagatatacagctcacagccgatcatcatccagaacaagggttcccaggaggaatcgaaggaaaacgacgcagtgtgtccggcacgcatccggcggcgatgctgccgagcaaattccgccattgccgggccgtataaattatcggcatgcgccaccagcagattgagcaggccgccatgggtgctcatcaccccttttggtcgtcccgtggagccagaagtgtaaataatataagccagatgcgcaccactgagcgcttcacgccgttcggcgtcaacgacaggttgagtcggtaatgccgcacattcgctgcggaaaacctcgtcatccaggcttaacgtcacagcgagttgcggcaattgctcacggatgctgttatgagttaataacaggcaaggacgcgcgtcatcgcacatcaattccagtcgatccagcggatagtccagatcaagcggcatataggccgcgccgctcgccaacacccctaaaatagccaccagagaatcgaccgaacgtggcaaacctatcgcaaccacatcgtcagcaccgacgccgcgagcaatcagcgcccgcgccaattgcgctactctaaccgaaagttgctgataactaagacgatgctcgccgcaggctaccgcgcaatcctccggctgctgggtaacgcgagaatggaaaatatccagtaccgaaaccgcacgggcaggcatggaaatcgccggtccgttggcccattgaacgatagccgccagttcctgcggatcgatcaatgacagttgcccgatcgccacatttggctggcgagcgatctgttggatcaaatattgaatacgctgagcgtgtaaacgcaggctggccatatcgtagcgcgccggattagcggttaactcaacgctaagctgaccttcatccagatacaggttgaactccaaatcctccaccggcccagaagccatttgatgagtgatcccatcaataccggcaaaattcagctgatattcaaacagtttgaaattaatggttgggccatacaaatcctgccctgcaccaaccattccgagatcgcgccgcagttgatcggcttcgtaacgctggtggcgtcgcagcgttttcagctctagagccagattacgcgcgacttcggccagagtgagatcgtcgcgcattttcgcctgtagcggcagcacgttgaccaccggccccagcgcgccaatagccacagaacccattcggcgcataaatggaaaaccgacggaaagatgctgttgcccgctcatacgatacaaatagctcatcaccaaggcaatcgccatatccgccgcagatagacgctgcgactttaccgcttcagtaatggccgaaaattgggcgatatcagtggagaagtggtagcgcagcggcaaaggagagagattctgttcgccgctgtttttcccagaggaagacagacaaaccggcaccggcagctccgccgcgtgctgtaaccagaactcacgatccttagcttccgcttccgacccttgataggccagatattcggccaccacttcgctaaaagcggtaaacggattttcacctgcgggcaatccagacaccagcgcagtatagatctcagctatacgtcgcgttaatgcggtaaaactaaagccatccaccattaaatgatgataacgctgataccacaaccagcgctcttcgccttcaggccgatctttcgccggactcactcggaataacagatggcgataacccggaacattcgcagattcaggacgatccgctcccaaaagatccgcttccatcaaaacctgagcggcgagggcggcatcgtttcgatctcgccaatccaatatttccgcaggcgcgatctgcttaggatcgatggcctgaggaatccactgtaccggcccgttatcacccgtgccaaa
